(19) United States
(12) Patent Application Publication
(10) Pub. No.: US 2003/0073207 A1
(43) Pub. Date: Apr. 17, 2003

(54) Enzymatic nucleic acid treatment of diseases or conditions related to levels of epidermal growth factor receptors

(76) Inventors: Saghir Akhtar, Safat (KW); James McSwiggen, Boulder, CO (US)

Correspondence Address: MCDONNELL BOEHNEN HULBERT & BERGHOFF, 300 SOUTH WACKER DRIVE, SUITE 3200, CHICAGO, IL, 60606, US

(21) Appl. No.: 09/848,754

(22) Filed: May 3, 2001

Related U.S. Application Data
(63) Continuation-in-part of application No. 09/401,063, filed on Sep. 22, 1999.
Application No. 09/401,063 is a continuation of application No. 08/985,162, filed on Dec. 4, 1997, now Pat. No. 6,057,156.
(60) Provisional application No. 60/036,476, filed on Jan. 31, 1997.

(51) Int. Cl. A61K 48/00; C07H 21/02; C12N 9/00

(52) U.S. Cl. 435/183; 536/23.1; 514/44

(57) ABSTRACT

The present invention relates to nucleic acid molecules, including antisense and enzymatic nucleic acid molecules, such as hammerhead ribozymes, DNAzymes, allozymes and antisense, which modulate the expression of epidermal growth factor receptor genes.

[0001] This patent application is a continuation-in-part of Akhtar et al., U.S. Ser. No. 09/401,063, filed Sep. 22, 1999, entitled “ENZYMATIC NUCLEIC ACID TREATMENT OF DISEASES OR CONDITIONS RELATED TO LEVELS OF EPIDERMAL GROWTH FACTOR” which is a continuation application of Akhtar et al., U.S. Ser. No. 08/985,162, filed Dec. 4, 1997 now U.S. Pat. No. 6,057,156 entitled “ENZYMATIC NUCLEIC ACID TREATMENT OF DISEASES OR CONDITIONS RELATED TO LEVELS OF EPIDERMAL GROWTH FACTOR”, which claims priority from Akhtar et al., USS No. 60/036,749, filed Jan. 31, 1997, entitled “ENZYMATIC NUCLEIC ACID TREATMENT OF DISEASES OR CONDITIONS RELATED TO LEVELS OF EPIDERMAL GROWTH FACTOR” These application are hereby incorporated by reference herein in their entirety including the drawings.

### BACKGROUND OF THE INVENTION

[0002] The present invention relates to therapeutic compositions and methods for the treatment or diagnosis of diseases or conditions related to EGFR expression levels, such as cancer. The discussion is not meant to be complete and is provided only for understanding of the invention that follows. This summary is not an admission that any of the work described below is prior art to the claimed invention.

[0003] The epidermal growth factor receptor (EGFR) is a 170 kDa transmembrane glycoprotein consisting of an extracellular ‘ligand’ binding domain, a transmembrane region and an intracellular domain with tyrosine kinase activity (Kung et al., 1994). The binding of growth factors to the EGFR results in down regulation of the ligand-receptor complex, autophosphorylation of the receptor and other protein substrates, leading ultimately to DNA synthesis and cell division. The external ligand binding domain is stimulated by EGF and also by TGFa, amphiregulin and some viral growth factors (Nodjtahedi & Dean, 1994).

[0004] One of the striking characteristics of the EGFR gene (c-erbBl), located on chromosome 7, is it's homology to the avian erythroblastosis virus oncogene (v-erbB), which induces malignancies in chickens. The v-erbB gene codes for a truncated product that lacks the extracellular ligand binding domain. The tyrosine kinase domain of the EGFR has been found to have 97% homology to the v-erbB transforming protein (Downward et al., 1984).

[0005] Recent studies have shown that the EGFR is overexpressed in a number of malignant human tissues when compared to their normal tissue counterparts (for review see Khazaie et al., 1993). An important finding has been the discovery that the gene for the receptor is both amplified and overexpressed in a number of cancer cells. Overexpression of the EGFR is often accompanied by the co-expression of the growth factors EGF and TGFa, suggesting that an autocrine pathway for control of growth may play a major part in the progression of tumors (Sporn & Roberts, 1985). It is now widely believed that this is a mechanism by which tumor cells can escape normal physiological control.

[0006] Growth factors and their receptors appear to have an important role in the development of human brain tumors. A high incidence of overexpression, amplification, deletion and structural rearrangement of the gene coding for the EGFR has been found in biopsies of brain tumors (Ostrowski et al., 1994). In fact the amplification of the EGFR gene in glioblastoma multiforme tumors is one of the most consistent genetic alterations known, with the EGFR being overexpressed in approximately 40% of malignant gliomas (Black, 1991). It has also been demonstrated that in 50% of glioblastomas, amplification of the EGFR gene is accompanied by the co-expression of mRNA for at least one or both of the growth factors EGF and TNFa (Ekstrand et al., 1991).

[0007] The amplified genes are frequently rearranged and associated with polymorphism leading to abnormal protein products (Wong et al., 1994). The rearrangements that have been characterized usually show deletions of part of the extracellular domain, resulting in the production of an EGFR protein that is smaller in size. Three classes of deletion mutant EGF receptor genes have been identified in glioblastoma tumors. Type I mutants lack the majority of the external domain, including the ligand binding site, type II mutants have a deletion in the domain adjacent to the membrane but can still bind ligands and type III, which is the most common and found in 17% of glioblastomas, have a deletion of 267 amino acids spanning domains I and II of the EGFR.

[0008] In addition to glioblastomas, abnormal EGFR expression has also been reported in a number of squamous epidermoid cancers and breast cancers (reviewed in Kung et al, 1994; Modjtahedi & Dean, 1994). Interestingly, evidence also suggests that many patients with tumors that overexpress the EGFR have a poorer prognosis than those who do not (Khazaie et al., 1993). Consequently, therapeutic strategies which can potentially inhibit or reduce the aberrant expression of the EGFR receptor are of great interest as potential anti-cancer agents.

[0009] Akhtar et al., U.S. Pat. No. 6,057,156, describe enzymatic nucleic acid molecules targeting epidermal growth factor receptors. Akhtar et al., International PCT publication No. WO 98/33893, describe enzymatic nucleic acid molecules targeting epidermal growth factor receptors.

[0010] Halatsch et al., 2000, J. Neurosurg., 92, 297-305, describe specific hairpin ribozymes targeting specific epidermal growth factor receptors.

[0011] Yamazaki et al., 1998, J. Natl. Cancer Inst., 90, 581-587, describe specific hammerhead ribozymes targeting specific epidermal growth factor receptors.

[0012] Fell et al., 1997, Antisense Nucleic Acid Drug Dev., 7, 319-326, describe 2′-amino and 2′-O-methyl modified chimeric hammerhead ribozymes targeting epidermal growth factor receptor mRNA. Yamazaki et al., 1995, PAACREAM, 36, 449, abstract No. 2556, describes a plasmid vector expressed hammerhead ribozyme targeted against a specific target site withing a specific mutant EGFR RNA.

[0013] Ludwig and Sproat, International PCT Publication No. WO 97/18312, describe a ribozyme with specific chemical modifications targeting EGFR.

[0014] Pyle and Michels, International PCT Publication No. WO 96/22689, describe specific group II intron based ribozymes targeting EGFR.

### SUMMARY OF THE INVENTION

[0015] The invention features novel nucleic acid-based molecules, for example, enzymatic nucleic acid molecules, antisense nucleic acids, 2-5A antisense chimeras, triplex DNA, decoy RNA, aptamers, and antisense nucleic acids containing RNA cleaving chemical groups, and methods to modulate gene expression, for example, genes encoding epidermal growth factor receptors. In particular, the instant invention features nucleic-acid based molecules and methods to modulate the expression of epidermal growth factor receptors (EGFR).

[0016] The invention features one or more nucleic acid-based molecules and methods that independently or in combination modulate the expression of gene(s) encoding epidermal growth factor receptors. In particular embodiments, the invention features nucleic acid-based molecules and methods that modulate the expression of EGFR gene, for example (Genbank Accession No. NM_{—}005228).

[0017] The invention also features nucleic acid-based molecules and methods that modulate the expression of genes encoding epidermal growth factor receptor (EGFR), for example, Genbank Accession No. NM005228, and ERBB2/HER2/NEU, for example, Genbank Accession Nos. NM_{—}004448 and X03363.

[0018] The description below of the various aspects and embodiments is provided with reference to the exemplary epidermal growth receptor (EGFR) gene, also recognized as ERBB or HER1. However, the various aspects and embodiments are also directed to other genes which express EGFR proteins and other receptors involved in oncogenesis. Those additional genes can be analyzed for target sites using the methods described for EGFR. Thus, the inhibition and the effects of such inhibition of the other genes can be performed as described herein.

[0019] In one embodiment, the invention features the use of an enzymatic nucleic acid molecule, preferably in the hammerhead, NCH, G-cleaver, amberzyme, zinzyme and/or DNAzyme motif, to down-regulate the expression of EGFR genes.

[0020] By “inhibit” or “down-regulate” it is meant that the expression of the gene, or level of RNAs or equivalent RNAs encoding one or more protein subunits, or activity of one or more protein subunits, such as EGFR subunit(s), is reduced below that observed in the absence of the nucleic acid molecules of the invention. In one embodiment, inhibition or down-regulation with enzymatic nucleic acid molecule preferably is below that level observed in the presence of an enzymatically inactive or attenuated molecule that is able to bind to the same site on the target RNA, but is unable to cleave that RNA. In another embodiment, inhibition or down-regulation with antisense oligonucleotides is preferably below that level observed in the presence of, for example, an oligonucleotide with scrambled sequence or with mismatches. In another embodiment, inhibition or down-regulation of EGFR with the nucleic acid molecule of the instant invention is greater in the presence of the nucleic acid molecule than in its absence.

[0021] By “up-regulate” is meant that the expression of the gene, or level of RNAs or equivalent RNAs encoding one or more protein subunits, or activity of one or more protein subunits, such as EGFR subunit(s), is greater than that observed in the absence of the nucleic acid molecules of the invention. For example, the expression of a gene, such as EGFR gene, can be increased in order to treat, prevent, ameliorate, or modulate a pathological condition caused or exacerbated by an absence or low level of gene expression.

[0022] By “modulate” is meant that the expression of the gene, or level of RNAs or equivalent RNAs encoding one or more protein subunits, or activity of one or more protein subunit(s) is up-regulated or down-regulated, such that the expression, level, or activity is greater than or less than that observed in the absence of the nucleic acid molecules of the invention.

[0023] By “enzymatic nucleic acid molecule” it is meant a nucleic acid molecule which has complementarity in a substrate binding region to a specified gene target, and also has an enzymatic activity which is active to specifically cleave target RNA. That is, the enzymatic nucleic acid molecule is able to intermolecularly cleave RNA and thereby inactivate a target RNA molecule. These complementary regions allow sufficient hybridization of the enzymatic nucleic acid molecule to the target RNA and thus permit cleavage. One hundred percent complementarity is preferred, but complementarity as low as 50-75% can also be useful in this invention (see for example Werner and Uhlenbeck, 1995, Nucleic Acids Research, 23, 2092-2096; Hammann et al., 1999, Antisense and Nucleic Acid Drug Dev., 9, 25-31). The nucleic acids can be modified at the base, sugar, and/or phosphate groups. The term enzymatic nucleic acid is used interchangeably with phrases such as ribozymes, catalytic RNA, enzymatic RNA, catalytic DNA, aptazyme or aptamer-binding ribozyme, regulatable ribozyme, catalytic oligonucleotides, nucleozyme, DNAzyme, RNA enzyme, endoribonuclease, endonuclease, minizyme, leadzyme, oligozyme or DNA enzyme. All of these terminologies describe nucleic acid molecules with enzymatic activity. The specific enzymatic nucleic acid molecules described in the instant application are not limiting in the invention and those skilled in the art will recognize that all that is important in an enzymatic nucleic acid molecule of this invention is that it has a specific substrate binding site which is complementary to one or more of the target nucleic acid regions, and that it have nucleotide sequences within or surrounding that substrate binding site which impart a nucleic acid cleaving and/or ligation activity to the molecule (Cech et al., U.S. Pat. No. 4,987,071; Cech et al., 1988, 260 JAMA 3030).

[0024] By “nucleic acid molecule” as used herein is meant a molecule having nucleotides. The nucleic acid can be single, double, or multiple stranded and can comprise modified or unmodified nucleotides or non-nucleotides or various mixtures and combinations thereof.

[0025] By “enzymatic portion” or “catalytic domain” is meant that portion/region of the enzymatic nucleic acid molecule essential for cleavage of a nucleic acid substrate (for example see FIG. 1).

[0026] By “substrate binding arm” or “substrate binding domain” is meant that portion/region of a enzymatic nucleic acid which is able to interact, for example via complementarity (i.e., able to base-pair with), with a portion of its substrate. Preferably, such complementarity is 100%, but can be less if desired. For example, as few as 10 bases out of 14 can be base-paired (see for example Werner and Uhlenbeck, 1995, Nucleic Acids Research, 23, 2092-2096; Hammann et al., 1999, Antisense and Nucleic Acid Drug Dev., 9, 25-31). Examples of such arms are shown generally in FIGS. 1-4. That is, these arms contain sequences within a enzymatic nucleic acid which are intended to bring enzymatic nucleic acid and target RNA together through complementary base-pairing interactions. The enzymatic nucleic acid of the invention can have binding arms that are contiguous or non-contiguous and may be of varying lengths. The length 22 of the binding arm(s) are preferably greater than or equal to four nucleotides and of sufficient length to stably interact with the target RNA; preferably 12-100 nucleotides; more preferably 14-24 nucleotides long (see for example Werner and Uhlenbeck, supra; Hamman et al., supra; Hampel et al., EP0360257; Berzal-Herrance et al., 1993, EMBO J., 12, 2567-73). If two binding arms are chosen, the design is such that the length of the binding arms are symmetrical (i.e., each of the binding arms is of the same length; e.g., five and five nucleotides, or six and six nucleotides, or seven and seven nucleotides long) or asymmetrical (i.e., the binding arms are of different length; e.g., six and three nucleotides; three and six nucleotides long; four and five nucleotides long; four and six nucleotides long; four and seven nucleotides long; and the like).

[0027] By “Inozyme” or “NCH” motif or configuration is meant, an enzymatic nucleic acid molecule comprising a motif as is generally described as NCH Rz in FIG. 2. Inozymes possess endonuclease activity to cleave RNA substrates having a cleavage triplet NCH/, where N is a nucleotide, C is cytidine and H is adenosine, uridine or cytidine, and/represents the cleavage site. H is used interchangeably with X. Inozymes can also possess endonuclease activity to cleave RNA substrates having a cleavage triplet NCN/, where N is a nucleotide, C is cytidine, and/represents the cleavage site. “I” in FIG. 2 represents an Inosine nucleotide, preferably a ribo-Inosine or xylo-Inosine nucleoside.

[0028] By “G-cleaver” motif or configuration is meant, an enzymatic nucleic acid molecule comprising a motif as is generally described as G-cleaver Rz in FIG. 2. G-cleavers possess endonuclease activity to cleave RNA substrates having a cleavage triplet NYN/, where N is a nucleotide, Y is uridine or cytidine and/represents the cleavage site. G-cleavers can be chemically modified as is generally shown in FIG. 2.

[0029] By “amberzyme” motif or configuration is meant, an enzymatic nucleic acid molecule comprising a motif as is generally described in FIG. 3. Amberzymes possess endonuclease activity to cleave RNA substrates having a cleavage triplet NGIN, where N is a nucleotide, G is guanosine, and/represents the cleavage site. Amberzymes can be chemically modified to increase nuclease stability through substitutions as are generally shown in FIG. 3. In addition, differing nucleoside and/or non-nucleoside linkers can be used to substitute the 5′-gaaa-3′ loops 1:; shown in the figure. Amberzymes represent a non-limiting example of an enzymatic nucleic acid molecule that does not require a ribonucleotide (2′-OH) group within its own nucleic acid sequence for activity.

[0030] By “zinzyme” motif or configuration is meant, an enzymatic nucleic acid molecule comprising a motif as is generally described in FIG. 4. Zinzymes possess endonuclease activity to cleave RNA substrates having a cleavage triplet including but not limited to YG/Y, where Y is uridine or cytidine, and G is guanosine and/represents the cleavage site. Zinzymes can be chemically modified to increase nuclease stability through substitutions as are generally shown in FIG. 4, including substituting 2′-O-methyl guanosine nucleotides for guanosine nucleotides. In addition, differing nucleotide and/or non-nucleotide linkers can be used to substitute the 5′-gaaa-2′ loop shown in the figure. Zinzymes represent a non-limiting example of an enzymatic nucleic acid molecule that does not require a ribonucleotide (2′-OH) group within its own nucleic acid sequence for activity.

[0031] By ‘DNAzyme’ is meant, an enzymatic nucleic acid molecule that does not require the presence of a 2′-OH group for its activity. In particular embodiments the enzymatic nucleic acid molecule can have an attached linker(s) or other attached or associated groups, moieties, or chains containing one or more nucleotides with 2′-OH groups. DNAzymes can be synthesized chemically or expressed endogenously in vivo, by means of a single stranded DNA vector or equivalent thereof. An example of a DNAzyme is shown in FIG. 5 and is generally reviewed in Usman et al., International PCT Publication No. WO 95/11304; Chartrand et al, 1995, NAR 23, 4092; Breaker et al., 1995, Chem. Bio. 2, 655; Santoro et al., 1997, PNAS 94, 4262; Breaker, 1999, Nature Biotechnology, 17, 422-423; and Santoro et. al., 2000, J. Am. Chem. Soc., 122, 2433-39. Additional DNAzyme motifs can be selected for using techniques similar to those described in these references, and hence, are within the scope of the present invention.

[0032] By “sufficient length” is meant an oligonucleotide of greater than or equal to 3 nucleotides that is of a length great enough to provide the intended function under the expected condition. For example, for binding arms of enzymatic nucleic acid “sufficient length” means that the binding arm sequence is long enough to provide stable binding to a target site under the expected binding conditions. Preferably, the binding arms are not so long as to prevent useful turnover of the nucleic acid molecule.

[0033] By “stably interact” is meant interaction of the oligonucleotides with target nucleic acid (e.g., by forming hydrogen bonds with complementary nucleotides in the target under physiological conditions) that is sufficient to the intended purpose (e.g., cleavage of target RNA by an enzyme).

[0034] By “equivalent” RNA to EGFR is meant to include those naturally occurring RNA molecules having homology (partial or complete) to EGFR proteins or encoding for proteins with similar function as EGFR proteins in various organisms, including human, rodent, primate, Arabbit, pig, protozoans, fungi, plants, and other microorganisms and parasites. The equivalent RNA sequence also includes in addition to the coding region, regions such as 5′-untranslated region, 3′-untranslated region, introns, intron-exon junction and the like.

[0035] By “homology” is meant the nucleotide sequence of two or more nucleic acid molecules is partially or completely identical.

[0036] By “antisense nucleic acid”, it is meant a non-enzymatic nucleic acid molecule that binds to target RNA by means of RNA-RNA or RNA-DNA or RNA-PNA (protein nucleic acid; Egholm et al., 1993 Nature 365, 566) interactions and alters the activity of the target RNA (for a review, see Stein and Cheng, 1993 Science 261, 1004 and Woolf et al., U.S. Pat. No. 5,849,902). Typically, antisense molecules are complementary to a target sequence along a single contiguous sequence of the antisense molecule. However, in certain embodiments, an antisense molecule can bind to substrate such that the substrate molecule forms a loop, and/or an antisense molecule can bind such that the antisense molecule forms a loop. Thus, the antisense molecule can be complementary to two (or even more) non-contiguous substrate sequences or two (or even more) non-contiguous sequence portions of an antisense molecule can be complementary to a target sequence or both. For a review of current antisense strategies, see Schmajuk et al., 1999, J. Biol. Chem., 274, 21783-21789, Delihas et al., 1997, Nature, 15, 751-753, Stein et al., 1997, Antisense N. A. Drug Dev., 7, 151, Crooke, 2000, Methods Enzymol., 313, 3-45; Crooke, 1998, Biotech. Genet. Eng. Rev., 15, 121-157, Crooke, 1997, Ad. Pharmacol., 40, 1-49. In addition, antisense DNA can be used to target RNA by means of DNA-RNA interactions, thereby activating RNase H, which digests the target RNA in the duplex. The antisense oligonucleotides can comprise one or more RNAse H activating region, which is capable of activating RNAse H cleavage of a target RNA. Antisense DNA can be synthesized chemically or expressed via the use of a single stranded DNA expression vector or equivalent thereof.

[0037] By “RNase H activating region” is meant a region (generally greater than or equal to 4-25 nucleotides in length, preferably from 5-11 nucleotides in length) of a nucleic acid molecule capable of binding to a target RNA to form a non-covalent complex that is recognized by cellular RNase H enzyme (see for example Arrow et al., U.S. Pat. No. 5,849,902; Arrow et al., U.S. Pat. No. 5,989,912). The RNase H enzyme binds to the nucleic acid molecule-target RNA complex and cleaves the target RNA sequence. The RNase H activating region comprises, for example, phosphodiester, phosphorothioate (preferably at least four of the nucleotides are phosphorothiote substitutions; more specifically, 4-11 of the nucleotides are phosphorothiote substitutions); phosphorodithioate, 5′-thiophosphate, or methylphosphonate backbone chemistry or a combination thereof. In addition to one or more backbone chemistries described above, the RNase H activating region can also comprise a variety of sugar chemistries. For example, the RNase H activating region can comprise deoxyribose, arabino, fluoroarabino or a combination thereof, nucleotide sugar chemistry. Those skilled in the art will recognize that the foregoing are non-limiting examples and that any combination of phosphate, sugar and base chemistry of a nucleic acid that supports the activity of RNase H enzyme is within the scope of the definition of the RNase H activating region and the instant invention.

[0038] By “2-5A antisense chimera” is meant an antisense oligonucleotide containing a 5′-phosphorylated 2′-5′-linked adenylate residue. These chimeras bind to target RNA in a sequence-specific manner and activate a cellular 2-SA-dependent ribonuclease which, in turn, cleaves the target RNA (Torrence et al., 1993 Proc. Natl. Acad. Sci. USA 90, 1300; Silverman et al., 2000, Methods Enzymol., 313, 522-533; Player and Torrence, 1998, Pharmacol. Ther., 78, 55-113).

[0039] By “triplex forming oligonucleotides” is meant an oligonucleotide that can bind to a double-stranded DNA in a sequence-specific manner to form a triple-strand helix. Formation of such triple helix structure has been shown to inhibit transcription of the targeted gene (Duval-Valentin et al., 1992 Proc. Natl. Acad. Sci. USA 89, 504; Fox, 2000, Curr. Med. Chem., 7, 17-37; Praseuth et. al, 2000, Biochim. Biophys. Acta, 1489, 181-206).

[0040] By “gene” it is meant a nucleic acid that encodes an RNA, for example, nucleic acid sequences including but not limited to structural genes encoding a polypeptide.

[0041] “Complementarity” refers to the ability of a nucleic acid to form hydrogen bond(s) with another RNA sequence by either traditional Watson-Crick or other non-traditional types. In reference to the nucleic molecules of the present invention, the binding free energy for a nucleic acid molecule with its target or complementary sequence is sufficient to allow the relevant function of the nucleic acid to proceed, e.g., enzymatic nucleic acid cleavage, antisense or triple helix inhibition. Determination of binding free energies for nucleic acid molecules is well known in the art (see, e.g., Turner et al., 1987, CSH Symp. Quant. Biol. LII pp.123-133; Frier et al., 1986, Proc. Nat. Acad. Sci. USA 83:9373-9377; Turner et al., 1987, J. Am. Chem. Soc. 109:3783-3785). A percent complementarity indicates the percentage of contiguous residues in a nucleic acid molecule which can form hydrogen bonds (e.g., Watson-Crick base pairing) with a second nucleic acid sequence (e.g., 5, 6, 7, 8, 9, 10 out of 10 being 50%, 60%, 70%, 80%, 90%, and 100% complementary). “Perfectly complementary” means that all the contiguous residues of a nucleic acid sequence will hydrogen bond with the same number of contiguous residues in a second nucleic acid sequence.

[0042] By “RNA” is meant a molecule comprising at least one ribonucleotide residue. By “ribonucleotide” or “2′-OH” is meant a nucleotide with a hydroxyl group at the 2′ position of a β-D-ribo-furanose moiety.

[0043] By “decoy RNA” is meant an RNA molecule or aptamer that is designed to preferentially bind to a predetermined ligand. Such binding can result in the inhibition or activation of a target molecule. The decoy RNA or aptamer can compete with a naturally occuring binding target for the binding of a specific ligand. For example, it has been shown that over-expression of HIV trans-activation response (TAR) RNA can act as a “decoy” and efficiently binds HIV tat protein, thereby preventing it from binding to TAR sequences encoded in the HIV RNA (Sullenger et al., 1990, Cell, 63, 601-608). This is but a specific example and those in the art will recognize that other embodiments can be readily generated using techniques generally known in the art, see for example Gold et al., 1995, Annu. Rev. Biochem., 64, 763; Brody and Gold, 2000, J. Biotechnol., 74, 5; Sun, 2000, Curr. Opin. Mol. Ther., 2, 100; Kusser, 2000, J. Biotechnol., 74, 27; Hermann and Patel, 2000, Science, 287, 820; and Jayasena, 1999, Clinical Chemistry, 45, 1628. Similarly, a decoy RNA can be designed to bind to a EGFR receptor and block the binding of EGFR or a decoy RNA can be designed to bind to EGFR and prevent interaction with the EGFR receptor.

[0044] Several varieties of naturally-occurring enzymatic RNAs are known presently. Each can catalyze the hydrolysis of RNA phosphodiester bonds in trans (and thus can cleave other RNA molecules) under physiological conditions. Table I summarizes some of the characteristics of these ribozymes. In general, enzymatic nucleic acids act by first binding to a target RNA. Such binding occurs through the target binding portion of a enzymatic nucleic acid which is held in close proximity to an enzymatic portion of the molecule that acts to cleave the target RNA. Thus, the enzymatic nucleic acid first recognizes and then binds a target RNA through complementary base-pairing, and once bound to the correct site, acts enzymatically to cut the target RNA. Strategic cleavage of such a target RNA will destroy its ability to direct synthesis of an encoded protein. After an enzymatic nucleic acid has bound and cleaved its RNA target, it is released from that RNA to search for another target and can repeatedly bind and cleave new targets. Thus, a single ribozyme molecule is able to cleave many molecules of target RNA. In addition, the ribozyme is a highly specific inhibitor of gene expression, with the specificity of inhibition depending not only on the base-pairing mechanism of binding to the target RNA, but also on the mechanism of target RNA cleavage. Single mismatches, or base-substitutions, near the site of cleavage can completely eliminate catalytic activity of a ribozyme.

[0045] The enzymatic nucleic acid molecule that cleave the specified sites in EGFR-specific RNAs represent a novel therapeutic approach to treat a variety of cancers, including but not limited to breast, lung, prostate, colorectal, brain, esophageal, bladder, pancreatic, cervical, head and neck, and ovarian cancer, melanoma, lymphoma, glioma, multidrug resistant cancers, and/or other cancers which respond to the modulation of EGFR expression.

[0046] In one embodiment of the inventions described herein, the enzymatic nucleic acid molecule is formed in a hammerhead or hairpin motif, but can also be formed in the motif of a hepatitis delta virus, group I intron, group II intron or RNase P RNA (in association with an RNA guide sequence), Neurospora VS RNA, DNAzymes, NCH cleaving motifs, or G-cleavers. Examples of such hammerhead motifs are described by Dreyfus, supra, Rossi et al., 1992, AIDS Research and Human Retroviruses 8, 183; of hairpin motifs by Hampel et al., EP0360257, Hampel and Tritz, 1989 Biochemistry 28, 4929, Feldstein et al., 1989, Gene 82, 53, Haseloff and Gerlach, 1989, Gene, 82, 43, and Hampel et al., 1990 Nucleic Acids Res. 18, 299; Chowrira & McSwiggen, U.S. Pat. No. 5,631,359; of the hepatitis delta virus motif is described by Perrotta and Been, 1992 Biochemistry 31, 16; of the RNase P motif by Guerrier-Takada et al., 1983 Cell 35, 849; Forster and Altman, 1990, Science 249, 783; Li and Altman, 1996, Nucleic Acids Res. 24, 835; Neurospora VS RNA ribozyme motif is described by Collins (Saville and Collins, 1990 Cell 61, 685-696; Saville and Collins, 1991 Proc. Natl. Acad. Sci. USA 88, 8826-8830; Collins and Olive, 1993 Biochemistry 32, 2795-2799; Guo and Collins, 1995, EMBO. J. 14, 363); Group II introns are described by Griffin et al., 1995, Chem. Biol. 2, 761; Michels and Pyle, 1995, Biochemistry 34, 2965; Pyle et al., International PCT Publication No. WO 96/22689; of the Group I intron by Cech et aL, U.S. Pat. No. 4,987,071 and of DNAzymes by Usman et al., International PCT Publication No. WO 95/11304; Chartrand et al., 1995, NAR 23, 4092; Breaker et al., 1995, Chem. Bio. 2, 655; Santoro et al., 1997, PNAS 94, 4262, and Beigelman et al., International PCT publication No. WO 99/55857. NCH cleaving motifs are described in Ludwig & Sproat, International PCT Publication No. WO 98/58058; and G-cleavers are described in Kore et al., 1998, Nucleic Acids Research 26, 4116-4120 and Eckstein et al., International PCT Publication No. WO 99/16871. Additional motifs such as the Aptazyme (Breaker et al., WO 98/43993), Amberzyme (Class I motif; FIG. 3; Beigelman et al., U.S. Serial No. 09/301,511) and Zinzyme (FIG. 4) (Beigelman et al., U.S. Ser. No. 09/301,511), all included by reference herein including drawings, can also be used in the present invention. These specific motifs or configurations are not limiting in the invention and those skilled in the art will recognize that all that is important in an enzymatic nucleic acid molecule of this invention is that it has a specific substrate binding site which is complementary to one or more of the target gene RNA regions, and that it have nucleotide sequences within or surrounding that substrate binding site which impart an RNA cleaving activity to the molecule (Cech et al., U.S. Pat. No. 4,987,071).

[0047] In one embodiment of the present invention, a nucleic acid molecule of the instant invention can be between 12 and 100 nucleotides in length. Exemplary enzymatic nucleic acid molecules of the invention are shown in Table III-VIII. For example, enzymatic nucleic acid molecules of the invention are preferably between 15 and 50 nucleotides in length, more preferably between 25 and 40 nucleotides in length, e.g., 34, 36, or 38 nucleotides in length (for example see Jarvis et al., 1996, J. Biol. Chem., 271, 29107-29112). Exemplary DNAzymes of the invention are preferably between 15 and 40 nucleotides in length, more preferably between 25 and 35 nucleotides in length, e.g., 29, 30, 31, or 32 nucleotides in length (see for example Santoro et al., 1998, Biochemistry, 37, 13330-13342; Chartrand et al., 1995, Nucleic Acids Research, 23, 4092-4096). Exemplary antisense molecules of the invention are preferably between 15 and 75 nucleotides in length, more preferably between 20 and 35 nucleotides in length, e.g., 25, 26, 27, or 28 nucleotides in length (see for example Woolf et al., 1992, PNAS., 89, 7305-7309; Milner et al., 1997, Nature Biotechnology, 15, 537-541). Exemplary triplex forming oligonucleotide molecules of the invention are preferably between 10 and 40 nucleotides in length, more preferably between 12 and 25 nucleotides in length, e.g., 18, 19, 20, or 21 nucleotides in length (see for example Maher et al., 1990, Biochemistry, 29, 8820-8826; Strobel and Dervan, 1990, Science, 249, 73-75). Those skilled in the art will recognize that all that is required is for the nucleic acid molecule are of length and conformation sufficient and suitable for the nucleic acid molecule to catalyze a reaction contemplated herein. The length of the nucleic acid molecules of the instant invention are not limiting within the general limits stated.

[0048] Preferably, a nucleic acid molecule that modulates, for example, down-regulates EGFR replication or expression comprises between 12 and 100 bases complementary to a RNA molecule of EGFR. Even more preferably, a nucleic acid molecule that modulates EGFR replication or expression comprises between 14 and 24 bases complementary to a RNA molecule of EGFR.

[0049] The invention provides a method for producing a class of nucleic acid-based gene modulating agents which exhibit a high degree of specificity for the RNA of a desired target. For example, the enzymatic nucleic acid molecule is preferably targeted to a highly conserved sequence region of target RNAs encoding EGFR (specifically EGFR genes) such that specific treatment of a disease or condition can be provided with either one or several nucleic acid molecules of the invention. Such nucleic acid molecules can be delivered exogenously to specific tissue or cellular targets as required. Alternatively, the nucleic acid molecules (e.g., ribozymes and antisense) can be expressed from DNA and/or RNA vectors that are delivered to specific cells.

[0050] As used in herein “cell” is used in its usual biological sense, and does not refer to an entire multicellular organism. The cell can, for example, be in vitro, e.g., in cell culture, or present in a multicellular organism, including,, e.g., birds, plants and mammals such as humans, cows, sheep, apes, monkeys, swine, dogs, and cats. The cell may be prokaryotic (e.g., bacterial cell) or eukaryotic (e.g., mammalian or plant cell).

[0051] By “EGFR proteins” is meant, protein receptor or a mutant protein derivative thereof, comprising epidermal growth factor receptor activity, for example binding of epidermal growth factor and/or tyrosine kinase activity.

[0052] By “highly conserved sequence region” is meant, a nucleotide sequence of one or more regions in a target gene does not vary significantly from one generation to the other or from one biological system to the other.

[0053] Nucleic acid-based inhibitorsof EGFR expression are useful for the prevention and/or treatment of cancers and cancerous conditions such as breast, lung, prostate, colorectal, brain, esophageal, bladder, pancreatic, cervical, head and neck, and ovarian cancer, melanoma, lymphoma, glioma, multidrug resistant cancers, and any other diseases or conditions that are related to or will respond to the levels of EGFR in a cell or tissue, alone or in combination with other therapies.

[0054] By “related” is meant that the reduction of EGFR expression (specifically EGFR gene) RNA levels and thus reduction in the level of the respective protein relieves, to some extent, the symptoms of the disease or condition.

[0055] The nucleic acid-based inhibitors of the invention are added directly, or can be complexed with cationic lipids, packaged within liposomes, or otherwise delivered to target cells or tissues. The nucleic acid or nucleic acid complexes can be locally administered to relevant tissues ex vivo, or in vivo through injection or infusion pump, with or without their incorporation in biopolymers. In preferred embodiments, the enzymatic nucleic acid inhibitors comprise sequences, which are complementary to the substrate sequences in Tables III to VIII and X. Examples of such enzymatic nucleic acid molecules also are shown in Tables III to VIII. Examples of such enzymatic nucleic acid molecules consist essentially of sequences defined in these tables.

[0056] In another embodiment, the invention features antisense nucleic acid molecules and 2-5A chimera including sequences complementary to the substrate sequences shown in Tables III to VIII and X. Such nucleic acid molecules can include sequences as shown for the binding arms of the enzymatic nucleic acid molecules in Tables III to VIII. Similarly, triplex molecules can be provided targeted to the corresponding DNA target regions, and containing the DNA equivalent of a target sequence or a sequence complementary to the specified target (substrate) sequence. Typically, antisense molecules are complementary to a target sequence along a single contiguous sequence of the antisense molecule. However, in certain embodiments, an antisense molecule can bind to substrate such that the substrate molecule forms a loop, and/or an antisense molecule can bind such that the antisense molecule forms a loop. Thus, the antisense molecule can be complementary to two (or even more) non-contiguous substrate sequences or two (or even more) non-contiguous sequence portions of an antisense molecule can be complementary to a target sequence or both.

[0057] By “consists essentially of” is meant that the active nucleic acid molecule of the invention, for example, an enzymatic nucleic acid molecule, contains an enzymatic center or core equivalent to those in the examples, and binding arms able to bind RNA such that cleavage at the target site occurs. Other sequences can be present which do not interfere with such cleavage. Thus, a core region can, for example, include one or more loop, stem-loop structure, or linker which does not prevent enzymatic activity. Thus, the underlined regions in the sequences in Tables III and IV can be such a loop, stem-loop, nucleotide linker, and/or non-nucleotide linker and can be represented generally as sequence “X”. For example, a core sequence for a hammerhead enzymatic nucleic acid can comprise a conserved sequence, such as 5′-CUGAUGAG-3′ and 5′-CGAA-3′ connected by “X”, where X is 5′-GCCGUUAGGC-3′ (SEQ ID NO 9632), or any other Stem II region known in the art, or a nucleotide and/or non-nucleotide linker. Similarly, for other nucleic acid molecules of the instant invention, such as Inozyme, G-cleaver, amberzyme, zinzyme, DNAzyme, antisense, 2-5A antisense, triplex forming nucleic acid, and decoy nucleic acids, other sequences or non-nucleotide linkers can be present that do not interfere with the function of the nucleic acid molecule.

[0058] Sequence X can be a linker of ≧2 nucleotides in length, preferably 3, 4, 5, 6, 7, 8, 9, 10, 15, 20, 26, 30, where the nucleotides can preferably be internally base-paired to form a stem of preferably ≧2 base pairs. Alternatively or in addition, sequence X can be a non-nucleotide linker. In yet another embodiment, the nucleotide linker X can be a nucleic acid aptamer, such as an ATP aptamer, HIV Rev aptamer (RRE), HIV Tat aptamer (TAR) and others (for a review see Gold et al., 1995, Annu. Rev. Biochem., 64, 763; and Szostak & Ellington, 1993, in The RNA World, ed. Gesteland and Atkins, pp. 511, CSH Laboratory Press). A “nucleic acid aptamer” as used herein is meant to indicate a nucleic acid sequence capable of interacting with a ligand. The 20.1 ligand can be any natural or a synthetic molecule, including but not limited to a resin, metabolites, nucleosides, nucleotides, drugs, toxins, transition state analogs, peptides, lipids, proteins, amino acids, nucleic acid molecules, hormones, carbohydrates, receptors, cells, viruses, bacteria and others.

[0059] In yet another embodiment, the non-nucleotide linker X is as defined herein. The term “non-nucleotide” as used herein include either abasic nucleotide, polyether, polyamine, polyamide, peptide, carbohydrate, lipid, or polyhydrocarbon compounds. Specific examples include those described by Seela and Kaiser, Nucleic Acids Res. 1990, 18:6353 and Nucleic Acids Res. 1987, 15:3113; Cload and Schepartz, J. Am. Chem. Soc. 1991, 113:6324; Richardson and Schepartz, J. Am. Chem. Soc. 1991, 113:5109; Ma et al., Nucleic Acids Res. 1993, 21:2585 and Biochemistry 1993, 32:1751; Durand et al., Nucleic Acids Res. 1990, 18:6353; McCurdy et al., Nucleosides & Nucleotides 1991, 10:287; Jschke et al., Tetrahedron Lett. 1993, 34:301; Ono et al., Biochemistry 1991, 30:9914; Arnold et al., International Publication No. WO 89/02439; Usman et al., International Publication No. WO 95/06731; Dudycz et al., International Publication No. WO 95/11910 and Ferentz and Verdine, J. Am. Chem. Soc. 1991, 113:4000, all hereby incorporated by reference herein. A “non-nucleotide” further means any group or compound which can be incorporated into a nucleic acid chain in the place of one or more nucleotide units, including either sugar and/or phosphate substitutions, and allows the remaining bases to exhibit their enzymatic activity. The group or compound can be abasic in that it does not contain a commonly recognized nucleotide base, such as adenosine, guanine, cytosine, uracil or thymine. Thus, in a preferred embodiment, the invention features an enzymatic nucleic acid molecule having one or more non-nucleotide moieties, and having enzymatic activity to cleave an RNA or DNA molecule.

[0060] In another aspect of the invention, enzymatic nucleic acid molecules or antisense molecules that interact with target RNA molecules and down-regulate EGFR (specifically EGFR gene) activity are expressed from transcription units inserted into DNA or RNA vectors. The recombinant vectors are preferably DNA plasmids or viral vectors. Enzymatic nucleic acid molecule or antisense expressing viral vectors can be constructed based on, but not limited to, adeno-associated virus, retrovirus, adenovirus, or alphavirus. Preferably, the recombinant vectors capable of expressing the enzymatic nucleic acid molecules or antisense are delivered as described above, and persist in target cells. Alternatively, viral vectors can be used that provide for transient expression of enzymatic nucleic acid molecules or antisense. Such vectors can be repeatedly administered as necessary. Once expressed, the enzymatic nucleic acid molecules or antisense bind to the target RNA and down-regulate its function or expression. Delivery of enzymatic nucleic acid molecule or antisense expressing vectors can be systemic, such as by intravenous or intramuscular administration, by administration to target cells ex-planted from the patient followed by reintroduction into the patient, or by any other means that would allow for introduction into the desired target cell. Antisense DNA can be expressed via the use of a single stranded DNA intracellular expression vector.

[0061] By “vectors” is meant any nucleic acid- and/or viral-based technique used to deliver a desired nucleic acid.

[0062] By “patient” is meant an organism, which is a donor or recipient of explanted cells or the cells themselves. “Patient” also refers to an organism to which the nucleic acid molecules of the invention can be administered. Preferably, a patient is a mammal or mammalian cells. More preferably, a patient is a human or human cells.

[0063] By “enhanced enzymatic activity” is meant to include activity measured in cells and/or in vivo where the activity is a reflection of both the catalytic activity and the stability of the nucleic acid molecules of the invention. In this invention, the product of these properties can be increased in vivo compared to an all RNA enzymatic nucleic acid or all DNA enzyme. In some cases, the activity or stability of the nucleic acid molecule can be decreased (i.e., less than ten-fold), but the overall activity of the nucleic acid molecule is enhanced, in vivo.

[0064] The nucleic acid molecules of the instant invention, individually, or in combination or in conjunction with other drugs, can be used to treat diseases or conditions discussed above. For example, to treat a disease or condition associated with the levels of EGFR, the patient can be treated, or other appropriate cells can be treated, as is evident to those skilled in the art, individually or in combination with one or more drugs under conditions suitable for the treatment.

[0065] In a further embodiment, the described molecules, such as antisense or ribozymes, can be used in combination with other known treatments to treat conditions or diseases discussed above. For example, the described molecules can be used in combination with one or more known therapeutic agents to treat breast, lung, prostate, colorectal, brain, esophageal, bladder, pancreatic, cervical, head and neck, and ovarian cancer, melanoma, lymphoma, glioma, multidrug resistant cancers, and/or other cancers which respond to the modulation of EGFR expression.

[0066] In another embodiment, the invention features nucleic acid-based inhibitors (e.g., enzymatic nucleic acid molecules (eg; ribozymes), antisense nucleic acids, 2-5A antisense chimeras, triplex DNA, antisense nucleic acids containing RNA cleaving chemical groups) and methods for their use to down regulate or inhibit the expression of genes (e.g., EGFR) capable of progression and/or maintenance of cancer, and/or other disease states which respond to the modulation of EGFR expression.

[0067] By “comprising” is meant including, but not limited to, whatever follows the word “comprising”. Thus, use of the term “comprising” indicates that the listed elements are required or mandatory, but that other elements are optional and may or may not be present. By “consisting of” is meant including, and limited to, whatever follows the phrase “consisting of”. Thus, the phrase “consisting of” indicates that the listed elements are required or mandatory, and that no other elements may be present.

[0068] Other features and advantages of the invention will be apparent from the following description of the preferred embodiments thereof, and from the claims.

### DESCRIPTION OF THE PREFERRED EMBODIMENTS

[0069] First the drawings will be described briefly.

[0070] Drawings

[0071] FIG. 1 shows the secondary structure model for seven different classes of enzymatic nucleic acid molecules. Arrow indicates the site of cleavage. - - - indicate the target sequence. Lines interspersed with dots are meant to indicate tertiary interactions. - - - is meant to indicate base-paired interaction. Group I Intron: PI-P9.0 represent various stem-loop structures (Cech et al., 1994, Nature Struc. Bio., 1, 273). RNase P (MIRNA): EGS represents external guide sequence (Forster et al., 1990, Science, 249, 783; Pace et al., 1990, J. Biol. Chem., 265, 3587). Group II Intron: 5′ SS means 5′ splice site; 3′ SS means 3′-splice site; IBS means intron binding site; EBS means exon binding site (Pyle et al., 1994, Biochemistry, 33, 2716). VS RNA: I-VI are meant to indicate six stem-loop structures; shaded regions are meant to indicate tertiary interaction (Collins, International PCT Publication No. WO 96/19577). HDV Ribozyme:: I-IV are meant to indicate four stem-loop structures (Been et al., U.S. Pat. No. 5,625,047). Hammerhead Ribozyme: I-III are meant to indicate three stem-loop structures; stems I-III can be of any length and can be symmetrical or asymmetrical (Usman et al., 1996, Curr. Op. Struct. Bio., 1, 527). Hairpin Ribozyme: Helix 1, 4 and 5 can be of any length; Helix 2 is between 3 and 8 base-pairs long; Y is a pyrimidine; Helix 2 (H2) is provided with a least 4 base pairs (i.e., n is 1, 2, 3 or 4) and helix 5 can be optionally provided of length 2 or more bases (preferably 3-20bases, i.e., m is from 1-20 or more). Helix 2 and helix 5 can be covalently linked by one or more bases (i.e., r is >1 base). Helix 1, 4 or 5 can also be extended by 2 or more base pairs (e.g., 4-20 base pairs) to stabilize the ribozyme structure, and preferably is a protein binding site. In each instance, each N and N′ independently is any normal or modified base and each dash represents a potential base-pairing interaction. These nucleotides can be modified at the sugar, base or phosphate. Complete base-pairing is not required in the helices, but is preferred. Helix 1 and 4 can be of any size (i.e., o and p is each independently from 0 to any number, e.g., 20) as long as some base-pairing is maintained. Essential bases are shown as specific bases in the structure, but those in the art will recognize that one or more can be modified chemically (abasic, base, sugar and/or phosphate modifications) or replaced with another base without significant effect. Helix 4 can be formed from two separate molecules, i.e., without a connecting loop. The connecting loop when present can be a ribonucleotide with or without modifications to its base, sugar or phosphate. “q”≧is 2 bases. The connecting loop can also be replaced with a non-nucleotide linker molecule. H refers to bases A, U, or C. Y refers to pyrimidine bases. “______” refers to a covalent bond. (Burke et al., 1996, Nucleic Acids & Mol. Biol., 10, 129; Chowrira et al., U.S. Pat. No. 5,631,359).

[0072] FIG. 2 shows examples of chemically stabilized ribozyme motifs. HH Rz, represents hammerhead ribozyme motif (Usman et al., 1996, Curr. Op. Struct. Bio., 1, 527); NCH Rz represents the NCH ribozyme motif (Ludwig & Sproat, International PCT Publication No. WO 98/58058); G-Cleaver, represents G-cleaver ribozyme motif (Kore et al., 1998, Nucleic Acids Research 26, 4116-4120, Eckstein et al., International PCT publication No. WO 99/16871). N or n, represent independently a nucleotide which can be same or different and have complementarity to each other; rI, represents ribo-Inosine nucleotide; arrow indicates the site of cleavage within the target. Position 4 of the HH Rz and the NCH Rz is shown as having 2′-C-allyl modification, but those skilled in the art will recognize that this position can be modified with other modifications well known in the art, so long as such modifications do not significantly inhibit the activity of the ribozyme.

[0073] FIG. 3 shows an example of the Amberzyme ribozyme motif that is chemically stabilized (see for example Beigelman et al., International PCT publication No. WO 99/55857).

[0074] FIG. 4 shows an example of the Zinzyme A ribozyme motif that is chemically stabilized (see for example Beigelman et al., Beigelman et al, International PCT publication No. WO 99/55857).

[0075] FIG. 5 shows an example of a DNAzyme motif described by Santoro et al., 1997, PNAS, 94,4262.

[0076] FIG. 6 is a graph showing nucleic acid (enzymatic nucleic acid and Genebloc) mediated anti-proliferation assay in A549 lung carcinoma cells. Cells were treated with 100 nm nucleic acid targeting EGFR RNA and a corresponding scrambled attenuated control or scrambled Genebloc control complexed with 5.0 μg/ml of lipid. Nucleic acid molecules and controls were compared to untreated cells after 24 hours post treatment.

[0077] FIG. 7 is a graph showing nucleic acid (enzymatic nucleic acid and Genebloc) mediated anti-proliferation assay in SKOV3 ovarian carcinoma cells. Cells were treated with 400 nm nucleic acid targeting EGFR RNA and a corresponding scrambled attenuated control or scrambled Genebloc control complexed with 2.5 μg/ml of lipid. Nucleic acid molecules and controls were compared to untreated cells after 24 hours post treatment.

[0078] FIG. 8 is a graph which shows the reduction of EGFR RNA in A549 lung carcinoma cells treated with 100 nm nucleic acid targeting EGFR RNA and a corresponding scrambled attenuated control or scrambled Genebloc control complexed with 5.0 μg/ml of lipid. Nucleic acid molecules and controls were compared to untreated cells after 24 hours post treatment.

[0079] FIG. 9 is a graph which shows the reduction of EGFR RNA in SKOV3 ovarian carcinoma cells treated with 400 nm nucleic acid targeting EGFR RNA and a corresponding scrambled attenuated control or scrambled Genebloc control complexed with 2.5 μg/ml of lipid. Nucleic acid molecules and controls were compared to untreated cells after 24 hours post treatment.

### MECHANISM OF ACTION OF NUCLEIC ACID MOLECULES OF THE INVENTION

[0080] Antisense:

[0081] Antisense molecules can be modified or unmodified RNA, DNA, or mixed polymer oligonucleotides and primarily function by specifically binding to matching sequences resulting in inhibition of peptide synthesis (Wu-Pong, Nov 1994, BioPharm, 20-33). The antisense oligonucleotide binds to target RNA by Watson Crick base-pairing and blocks gene expression by preventing ribosomal translation of the bound sequences either by steric blocking or by activating RNase H enzyme. Antisense molecules can also alter protein synthesis by interfering with RNA processing or transport from the nucleus into the cytoplasm (Mukhopadhyay & Roth, 1996, Crit. Rev. in Oncogenesis 7, 151-190).

[0082] In addition, binding of single stranded DNA to RNA can result in nuclease degradation of m52 the heteroduplex (Wu-Pong, supra; Crooke, supra). To date, the only backbone modified DNA chemistry which act as substrates for RNase H are phosphorothioates, phosphorodithioates, and borontrifluoridates. Recently it has been reported that 2′-arabino and 2′-fluoro arabino-containing oligos can also activate RNase H activity.

[0083] A number of antisense molecules have been described that utilize novel configurations of chemically modified nucleotides, secondary structure, and/or RNase H substrate domains (Woolf et al., International PCT Publication No. WO 98/13526; Thompson et al., International PCT Publication No. WO 99/54459; Hartmann et al., USS No. 60/101,174 which was filed on Sep. 21, 1998) all of these are incorporated by reference herein in their entirety.

[0084] In addition, antisense deoxyoligoribonucleotides can be used to target RNA by means of DNA-RNA interactions, thereby activating RNase H, which digests the target RNA in the duplex. Antisense DNA can be expressed via the use of a single stranded DNA intracellular expression vector or equivalents and variations thereof.

[0085] Triplex Forming Oligonucleotides (TFO):

[0086] Single stranded DNA can be designed to bind to genomic DNA in a sequence specific manner. TFOs are comprised of pyrimidine-rich oligonucleotides which bind DNA helices through Hoogsteen Base-pairing (Wu-Pong, supra). The resulting triple helix composed of the DNA sense, DNA antisense, and TFO disrupts RNA synthesis by RNA polymerase. The TFO mechanism can result in gene expression or cell death since binding can be irreversible (Mukhopadhyay & Roth, supra).

[0087] 2-5A Antisense Chimera:

[0088] The 2-5A system is an interferon mediated mechanism for RNA degradation found in higher vertebrates (Mitra et al., 1996, Proc Nat Acad Sci USA 93, 6780-6785). Two types of enzymes, 2-5A synthetase and RNase L, are required for RNA cleavage. The 2-5A synthetases require double stranded RNA to form 2′-5′ oligoadenylates (2-5A). 2-5A then acts as an allosteric effector for utilizing RNase L which has the ability to cleave single stranded RNA. The ability to form 2-5A structures with double stranded RNA makes this system particularly useful for inhibition of viral replication.

[0089] (2′-5′) oligoadenylate structures can be covalently linked to antisense molecules to form chimeric oligonucleotides capable of RNA cleavage (Torrence, supra). These molecules putatively bind and activate a 2-5A dependent RNase, the oligonucleotide/enzyme complex then binds to a target RNA molecule which can then be cleaved by the RNase enzyme.

[0090] Enzymatic Nucleic Acid:

[0091] Several varieties of naturally-occurring enzymatic RNAs are presently known. In addition, several in vitro selection (evolution) strategies (Orgel, 1979, Proc. R. Soc. London, B 205, 435) have been used to evolve new nucleic acid catalysts capable of catalyzing cleavage and ligation of phosphodiester linkages (Joyce, 1989, Gene, 82, 83-87; Beaudry et al., 1992, Science 257, 635-641; Joyce, 1992, Scientific American 267, 90-97; Breaker et al., 1994, TIBTECH 12, 268; Bartel et al.,1993, Science 261:1411-1418; Szostak, 1993, TIBS 17, 89-93; Kumar et al., 1995, FASEB J., 9, 1183; Breaker, 1996, Curr. Op. Biotech., 7, 442; Santoro et al., 1997, Proc. Natl. Acad. Sci., 94, 4262; Tang et al., 1997, RNA 3, 914; Nakamaye & Eckstein, 1994, supra; Long & Uhlenbeck, 1994, supra; Ishizaka et al., 1995, supra; Vaish et al., 1997, Biochemistry 36, 6495; all of these are incorporated by reference herein). Each can catalyze a series of reactions including the hydrolysis of phosphodiester bonds in trans (and thus can cleave other RNA molecules) under physiological conditions.

[0092] Nucleic acid molecules of this invention will block to some extent EGFR and/or HER2 protein expression and can be used to treat disease or diagnose disease associated with the levels of EGFR and/or HER2. Enzymatic nucleic acid sequences targeting EGFR RNA and sequences that can be targeted with nucleic acid molecules of the invention to down-regulate EGFR expression are shown in Tables III-XIII. Sequences that can be targeted with enzymatic nucleic acid molecules of the invention to down-regulate EGFR and/or HER2 expression are shown in Table X.

[0093] The enzymatic nature of an enzymatic nucleic acid molecule has significant advantages, one advantage being that the concentration of enzymatic nucleic acid molecule necessary to affect a therapeutic treatment is lower. This advantage reflects the ability of the enzymatic nucleic acid molecule to act enzymatically. Thus, a single enzymatic nucleic acid molecule is able to cleave many molecules of target RNA. In addition, the enzymatic nucleic acid molecule is a highly specific inhibitor, with the specificity of inhibition depending not only on the base-pairing mechanism of binding to the target RNA, but also on the mechanism of target RNA cleavage. Single mismatches, or base-substitutions, near the site of cleavage can be chosen to completely eliminate catalytic activity of a enzymatic nucleic acid molecule. Nucleic acid molecules having an endonuclease enzymatic activity are able to repeatedly cleave other separate RNA molecules in a nucleotide base sequence-specific manner. Such enzymatic nucleic acid molecules can be targeted to virtually any RNA transcript, and achieved efficient cleavage in vitro (Zaug et al., 324, Nature 429 1986; Uhlenbeck, 1987 Nature 328, 596; Kim et al., 84 Proc. Natl. Acad. Sci. USA 8788, 1987; Dreyfus, 1988, Einstein Quart. J. Bio. Med., 6, 92; Haseloff and Gerlach, 334 Nature 585, 1988; Cech, 260 JAMA 3030, 1988; and Jefferies et al., 17 Nucleic Acids Research 1371, 1989; Santoro et al., 1997 supra).

[0094] Because of their sequence specificity, trans-cleaving enzymatic nucleic acid molecules can be used as therapeutic agents for human disease (Usman & McSwiggen, 1995 Ann. Rep. Med. Chem. 30, 285-294; Christoffersen and Marr, 1995 J. Med. Chem. 38, 2023-2037). Enzymatic nucleic acid molecules can be designed to cleave specific RNA targets within the background of cellular RNA. Such a cleavage event renders the RNA non-functional and abrogates protein expression from that RNA. In this manner, synthesis of a protein associated with a disease state can be selectively inhibited (Warashina et al., 1999, Chemistry and Biology, 6, 237-250).

[0095] Enzymatic nucleic acid molecules of the invention that are allosterically regulated (“allozymes”) can be used to down-regulate EGFR expression. These allosteric enzymatic nucleic acids or allozymes (see for example George et al., U.S. Pat. Nos. 5,834,186 and 5,741,679, Shih et al., U.S. Pat. No. 5,589,332, Nathan et al., U.S. Pat. No. 5,871,914, Nathan and Ellington, International PCT publication No. WO 00/24931, Breaker et al., International PCT Publication Nos. WO 00/26226 and 98/27104, and Sullenger et al., International PCT publication No. WO 99/29842) are designed to respond to a signaling agent, for example, mutant EGFR protein, wild-type EGFR protein, mutant EGFR RNA, wild-type EGFR RNA, other proteins and/or RNAs involved in EGFR signal transduction, compounds, metals, polymers, molecules and/or drugs that are targeted to EGFR expressing cells etc., which in turn modulates the activity of the enzymatic nucleic acid molecule. In response to interaction with a predetermined signaling agent, the allosteric enzymatic nucleic acid molecule's activity is activated or inhibited such that the expression of a particular target is selectively down-regulated.

[0096] The target can comprise wild-type EGFR, mutant EGFR, and/or a predetermined component of the EGFR signal transduction pathway. In a specific example, allosteric enzymatic nucleic acid molecules that are activated by interaction with a RNA encoding a mutant EGFR protein are used as therapeutic agents in vivo. The presence of RNA encoding the mutant EGFR protein activates the allosteric enzymatic nucleic acid molecule that subsequently cleaves the RNA encoding a mutant EGFR protein resulting in the inhibition of mutant EGFR protein expression. In this manner, cancerous cells that express the mutant form of the EGFR protein are selectively targeted.

[0097] In another non-limiting example, an allozyme can be activated by a EGFR protein, peptide, or mutant polypeptide that caused the allozyme to inhibit the expression of EGFR gene, by, for example, cleaving RNA encoded by EGFR gene. In this non-limiting example, the allozyme acts as a decoy to inhibit the flnction of EGFR and also inhibit the expression of EGFR once activated by the EGFR protein. The nucleic acid molecules of the instant invention are also referred to as GeneBloc reagents, which are essentially nucleic acid molecules (eg; ribozymes, antisense) capable of down-regulating gene expression.

[0098] Target Sites

[0099] Targets for useful enzymatic nucleic acid molecules and antisense nucleic acids can be determined as disclosed in Draper et al., WO 93/23569; Sullivan et al., WO 93/23057;Thompson et al., WO 94/02595; Draper et al., WO 95/04818; McSwiggen et al., U.S. Pat. No. 5,525,468, and hereby incorporated by reference herein in totality. Other examples include the following PCT applications, which concern inactivation of expression of disease-related genes: WO 95/23225, WO 95/13380, WO 94/02595, incorporated by reference herein. Rather than repeat the guidance provided in those documents here, below are provided specific examples of such methods, not limiting to those in the art. Enzymatic nucleic acid molecules and antisense to such targets are designed as described in those applications and synthesized to be tested in vitro and in vivo, as also described. The sequences of human EGFR RNAs were screened for optimal enzymatic nucleic acid and antisense target sites using a computer-folding algorithm. Antisense, hammerhead, DNAzyme, NCH, amberzyme, zinzyme, or G-Cleaver enzymatic nucleic acid molecule binding/cleavage sites were identified. These sites are shown in Tables III to VIII and X (all sequences are 5′ to 3′ in the tables; underlined regions can be any sequence “X” or linker X, the actual sequence is not relevant here). The nucleotide base position is noted in the Tables as that site to be cleaved by the designated type of enzymatic nucleic acid molecule. While human sequences can be screened and enzymatic nucleic acid molecule and/or antisense thereafter designed, as discussed in Stinchcomb et al., WO 95/23225, mouse targeted enzymatic nucleic acid molecules can be useful to test efficacy of action of the enzymatic nucleic acid molecule and/or antisense prior to testing in humans.

[0100] Antisense, hammerhead, DNAzyme, NCH, amberzyme, zinzyme or G-Cleaver enzymatic nucleic acid molecule binding/cleavage sites were identified. The nucleic acid molecules are individually analyzed by computer folding (Jaeger et al., 1989 Proc. Natl. Acad. Sci. USA, 86, 7706) to assess whether the sequences fold into the appropriate secondary structure. Those nucleic acid molecules with unfavorable intramolecular interactions such as between the binding arms and the catalytic core are eliminated from consideration. Varying binding arm lengths can be chosen to optimize activity.

[0101] Antisense, hammerhead, DNAzyme, NCH, amberzyme, zinzyme or G-Cleaver enzymatic nucleic acid molecule binding/cleavage sites were identified and were designed to anneal to various sites in the RNA target. The binding arms are complementary to the target site sequences described above. The nucleic acid molecules were chemically synthesized. The method of synthesis used follows the procedure for normal DNA/RNA synthesis as described below and in Usman et al., 1987 J. Am. Chem. Soc., 109, 7845; Scaringe et al., 1990 Nucleic Acids Res., 18, 5433; and Wincott et al., 1995 Nucleic Acids Res. 23, 2677-2684; Caruthers et al., 1992, Methods in Enzymology 211,3-19.

[0102] Synthesis of Nucleic acid Molecules

[0103] Synthesis of nucleic acids greater than 100 nucleotides in length is difficult using automated methods, and the therapeutic cost of such molecules is prohibitive. In this invention, small nucleic acid motifs (“small refers to nucleic acid motifs less than about 100 nucleotides in length, preferably less than about 80 nucleotides in length, and more preferably less than about 50 nucleotides in length; e.g., antisense oligonucleotides, hammerhead or the NCH ribozymes) are preferably used for exogenous delivery. The simple structure of these molecules increases the ability of the nucleic acid to invade targeted regions of RNA structure. Exemplary molecules of the instant invention are chemically synthesized, and others can similarly be synthesized.

[0104] Oligonucleotides (eg; antisense GeneBlocs) are synthesized using protocols known in the art as described in Caruthers et al., 1992, Methods in Enzymology 211, 3-19, Thompson et al., International PCT Publication No. WO 99/54459, Wincott et al., 1995, Nucleic Acids Res. 23, 2677-2684, Wincott et al., 1997, Methods Mol. Bio., 74, 59, Brennan et al., 1998, Biotechnol Bioeng., 61, 33-45, and Brennan, U.S. Pat. No. 6,001,311. All of these references are incorporated herein by reference. The synthesis of oligonucleotides makes use of common nucleic acid protecting and coupling groups, such as dimethoxytrityl at the 5′-end, and phosphoramidites at the 3′-end. In a non-limiting example, small scale syntheses are conducted on a 394 Applied Biosystems, Inc. synthesizer using a 0.2 μmol scale protocol with a 2.5 min coupling step for 2′-O-methylated nucleotides and a 45 sec coupling step for 2′-deoxy nucleotides. Table II outlines the amounts and the contact times of the reagents used in the synthesis cycle. Alternatively, syntheses at the 0.2 μmol scale can be performed on a 96-well plate synthesizer, such as the instrument produced by Protogene (Palo Alto, Calif.) with minimal modification to the cycle. A 33-fold excess (60 μL of 0.11 M=6.6 limol) of 2′-O-methyl phosphoramidite and a 105-fold excess of S-ethyl tetrazole (60 μL of 0.25 M=15 tmol) can be used in each coupling cycle of 2′-O-methyl residues relative to polymer-bound 5′-hydroxyl. A 22-fold excess (40 μL of 0.11 M=4.4 tmol) of deoxy phosphoramidite and a 70-fold excess of S-ethyl tetrazole (40 μL of 0.25 M=10 tmol) can be used in each coupling cycle of deoxy residues relative to polymer-bound 5′-hydroxyl. Average coupling yields on the 394 Applied Biosystems, Inc. synthesizer, determined by colorimetric quantitation of the trityl fractions, are typically 97.5-99%. Other oligonucleotide synthesis reagents for the 394 Applied Biosystems, Inc. synthesizer include; detritylation solution is 3% TCA in methylene chloride (ABI); capping is performed with 16% N-methyl imidazole in THF (ABI) and 10% acetic anhydride/10% 2,6-lutidine in THF (ABI); and oxidation solution is 16.9 mM 12, 49 mM pyridine, 9% water in THF (PERSEPTIVE™). Burdick & Jackson Synthesis Grade acetonitrile is used directly from the reagent bottle. S-Ethyltetrazole solution (0.25 M in acetonitrile) is made up from the solid obtained from American International Chemical, Inc. Alternately, for the introduction of phosphorothioate linkages, Beaucage reagent (3H-1,2-Benzodithiol-3-one 1,1-dioxide, 0.05 M in acetonitrile) is used.

[0105] Deprotection of the antisense oligonucleotides is performed as follows: the polymer-bound trityl-on oligoribonucleotide is transferred to a 4 mL glass screw top vial and suspended in a solution of 40% aq. methylamine (1 mL) at 65° C. for 10 min. After cooling to −20° C., the supernatant is removed from the polymer support. The support is washed three times with 1.0 mL of EtOH:MeCN:H20/3:1:1, vortexed and the supernatant is then added to the first supernatant. The combined supernatants, containing the oligoribonucleotide, are dried to a white powder.

[0106] The method of synthesis used for normal RNA including certain enzymatic nucleic acid molecules follows the procedure as described in Usman et al., 1987, J. Am. Chem. Soc., 109, 7845; Scaringe et al., 1990, Nucleic Acids Res., 18, 5433; and Wincott et al., 1995, Nucleic Acids Res. 23, 2677-2684 Wincott et al., 1997, Methods Mol. Bio., 74, 59, and makes use of common nucleic acid protecting and coupling groups, such as dimethoxytrityl at the 5′-end, and phosphoramidites at the 3′-end. In a non-limiting example, small scale syntheses are conducted on a 394 Applied Biosystems, Inc. synthesizer using a 0.2 lmol scale protocol with a 7.5 min coupling step for alkylsilyl protected nucleotides and a 2.5 min coupling step for 2′-O-methylated nucleotides. Table II outlines the amounts and the contact times of the reagents used in the synthesis cycle. Alternatively, syntheses at the 0.2 μmol scale can be done on a 96-well plate synthesizer, such as the instrument produced by Protogene (Palo Alto, Calif.) with minimal modification to the cycle. A 33-fold excess (60 μL of 0.11 M=6.6 tmol) of 2′-O-methyl phosphoramidite and a 75-fold excess of S-ethyl tetrazole (60 μL of 0.25 M=15 μmol) can be used in each coupling cycle of 2′-O-methyl residues relative to polymer-bound 5′-hydroxyl. A 66-fold excess (120 μL of 0.11 M=13.2 μmol) of alkylsilyl (ribo) protected phosphoramidite and a 150-fold excess of S-ethyl tetrazole (120 μL of 0.25 M=30 μmol) can be used in each coupling cycle of ribo residues relative to polymer-bound 5′-hydroxyl. Average coupling yields on the 394 Applied Biosystems, Inc. synthesizer, determined by calorimetric quantitation of the trityl fractions, are typically 97.5-99%. Other oligonucleotide synthesis reagents for the 394 Applied Biosystems, Inc. synthesizer include; detritylation solution is 3% TCA in methylene chloride (ABI); capping is performed with 16% N-methyl imidazole in THF (ABI) and 10% acetic anhydride/10% 2,6-lutidine in THF (ABI); oxidation solution is 16.9 mM I₂, 49 mM pyridine, 9% water in THF (PERSEPTIVETM). Burdick & Jackson Synthesis Grade acetonitrile is used directly from the reagent bottle. S-Ethyltetrazole solution (0.25 M in acetonitrile) is made up from the solid obtained from American International Chemical, Inc. Alternately, for the introduction of phosphorothioate linkages, Beaucage reagent (3H-1,2-Benzodithiol-3-one 1,1-dioxide 0.05 M in acetonitrile) is used.

[0107] Deprotection of the RNA is performed using either a two-pot or one-pot protocol. For the two-pot protocol, the polymer-bound trityl-on oligoribonucleotide is transferred to a 4 mL glass screw top vial and suspended in a solution of 40% aq. methylamine (1 mL) at 65° C. for 10 min. After cooling to −20° C., the supernatant is removed from the polymer support. The support is washed three times with 1.0 mL of EtOH:MeCN:H2O/3:1:1, vortexed and the supernatant is then added to the first supernatant. The combined supernatants, containing the oligoribonucleotide, are dried to a white powder. The base deprotected oligoribonucleotide is resuspended in anhydrous TEA/HF/NMP solution (300 μL of a solution of 1.5 mL N-methylpyrrolidinone, 750 μL TEA and 1 mL TEA.3HF to provide a 1.4 M HF concentration) and heated to 65° C. After 1.5 h, the oligomer is quenched with 1.5 M NH₄HCO₃.

[0108] Alternatively, for the one-pot protocol, the polymer-bound trityl-on oligoribonucleotide is transferred to a 4 mL glass screw top vial and suspended in a solution of 33% ethanolic methylamine/DMSO: 1/1 (0.8 mL) at 65° C. for 15 min. The vial is brought to r.t. TEA.3HF (0.1 mL) is added and the vial is heated at 65° C. for 15 min. The sample is cooled at −20° C. and then quenched with 1.5 M NH₄HCO₃.

[0109] For purification of the trityl-on oligomers, the quenched NH₄HCO₃ solution is loaded onto a C-18 containing cartridge that had been prewashed with acetonitrile followed by 50 mM TEAA. After washing the loaded cartridge with water, the RNA is detritylated with 0.5% TFA for 13 min. The cartridge is then washed again with water, salt exchanged with 1 M NaCl and washed with water again. The oligonucleotide is then eluted with 30% acetonitrile.

[0110] Inactive hammerhead ribozymes or binding attenuated control (BAC) oligonucleotides) are synthesized by substituting a U for G₅ and a U for A14 (numbering from Hertel, K. J., et al., 1992, Nucleic Acids Res., 20, 3252). Similarly, one or more nucleotide substitutions can be introduced in other enzymatic nucleic acid molecules to inactivate the molecule and such molecules can serve as a negative control.

[0111] The average stepwise coupling yields are typically >98% (Wincott et al., 1995 Nucleic Acids Res. 23, 2677-2684). Those of ordinary skill in the art will recognize that the scale of synthesis can be adapted to be larger or smaller than the example described above including but not limited to 96 well format, all that is important is the ratio of chemicals used in the reaction.

[0112] Alternatively, the nucleic acid molecules of the present invention can be synthesized separately and joined together post-synthetically, for example by ligation (Moore et al., 1992, Science 256, 9923; Draper et al., International PCT publication No. WO 93/23569; Shabarova et al., 1991, Nucleic Acids Research 19, 4247; Bellon et al., 1997, Nucleosides & Nucleotides, 16, 951; Bellon et al., 1997, Bioconjugate Chem. 8, 204).

[0113] The nucleic acid molecules of the present invention are modified extensively to enhance stability by modification with nuclease resistant groups, for example, 2′-amino, 2′-C-allyl, 2′-flouro, 2′-O-methyl, 2′-H (for a review see Usman and Cedergren, 1992, TIBS 17, 34; Usman et al., 1994, Nucleic Acids Symp. Ser. 31, 163). Ribozymes are purified by gel electrophoresis using general methods or are purified by high pressure liquid chromatography (HPLC; See Wincott et al., Supra, the totality of which is hereby incorporated herein by reference) and are re-suspended in water.

[0114] The sequences of the nucleic acid molecules, including enzymatic nucleic acid molecules and antisense, that are chemically synthesized, are shown in Table VIII. The sequences of the enzymatic nucleic acid and antisense constructs that are chemically synthesized, are complementary to the Substrate sequences shown in Table VIII. Those in the art will recognize that these sequences are representative only of many more such sequences where the enzymatic portion of the ribozyme (all but the binding arms) is altered to affect activity. The ribozyme and antisense construct sequences listed in Tables III to VIII can be formed of ribonucleotides or other nucleotides or non-nucleotides. Such enzymatic nucleic acid molecules with enzymatic activity are equivalent to the enzymatic nucleic acid molecules described specifically in the Tables.

[0115] Optimizing Activity of the Nucleic Acid Molecule of the Invention.

[0116] Chemically synthesizing nucleic acid molecules with modifications (base, sugar and/or phosphate) that prevent their degradation by serum ribonucleases can increase their potency (see e.g., Eckstein et al., International Publication No. WO 92/07065; Perrault et al., 1990 Nature 344, 565; Pieken et al., 1991, Science 253, 314; Usman and Cedergren, 1992, Trends in Biochem. Sci. 17, 334; Usman et al., International Publication No. WO 93/15187; and Rossi et al., International Publication No. WO 91/03162; Sproat, U.S. Pat. No. 5,334,711; and Burgin et al., supra; all of these describe various chemical modifications that can be made to the base, phosphate and/or sugar moieties of the nucleic acid molecules herein). Modifications which enhance their efficacy in cells, and removal of bases from nucleic acid molecules to shorten oligonucleotide synthesis times and reduce chemical requirements are desired. (All these publications are hereby incorporated by reference herein).

[0117] There are several examples in the art describing sugar, base and phosphate modifications that can be introduced into nucleic acid molecules with significant enhancement in their nuclease stability and efficacy. For example, oligonucleotides are modified to enhance stability and/or enhance biological activity by modification with nuclease resistant groups, for example, 2′-amino, 2′-C-allyl, 2′-flouro, 2′-O-methyl, 2′-H, nucleotide base modifications (for a review see Usman and Cedergren, 1992, TIBS. 17, 34; Usman et al., 1994, Nucleic Acids Symp. Ser. 31, 163; Burgin et al., 1996, Biochemistry , 35, 14090). Sugar modification of nucleic acid molecules have been extensively described in the art (see Eckstein et al., International Publication PCT No. WO 92/07065; Perrault et al. Nature, 1990, 344, 565-568; Pieken et al. Science, 1991, 253, 314-317; Usman and Cedergren, Trends in Biochem. Sci. , 1992, 17, 334-339; Usman et al. International Publication PCT No. WO 93/15187; Sproat, U.S. Pat. No. 5,334,711 and Beigelman et al., 1995, J. Biol. Chem., 270, 25702; Beigelman et al., International PCT publication No. WO 97/26270; Beigelman et al., U.S. Pat. No. 5,716,824; Usman et al., U.S. Pat. No. 5,627,053; Woolf et al, International PCT Publication No. WO 98/13526; Thompson et al., USS No. 60/082,404 which was filed on Apr. 20, 1998; Karpeisky et al., 1998, Tetrahedron Lett., 39, 1131; Earnshaw and Gait, 1998, Biopolymers (Nucleic acid Sciences), 48, 39-55; Verma and Eckstein, 1998, Annu. Rev. Biochem., 67, 99-134; and Burlina et al., 1997,Bioorg. Med. Chem., 5, 1999-2010; all of the references are hereby incorporated in their totality by reference herein). Such publications describe general methods and strategies to determine the location of incorporation of sugar, base and/or phosphate modifications and the like into ribozymes without inhibiting catalysis, and are incorporated by reference herein. In view of such teachings, similar modifications can be used as described herein to modify the nucleic acid molecules of the instant invention.

[0118] While chemical modification of oligonucleotide internucleotide linkages with phosphorothioate, phosphorothioate, and/or 5′-methylphosphonate linkages improves stability, too many of these modifications can cause some toxicity. Therefore when designing nucleic acid molecules the amount of these internucleotide linkages should be minimized. The reduction in the concentration of these linkages should lower toxicity resulting in increased efficacy and higher specificity of these molecules.

[0119] Nucleic acid molecules having chemical modifications that maintain or enhance activity are provided. Such nucleic acid is also generally more resistant to nucleases than unmodified nucleic acid. Thus, in a cell and/or in vivo the activity may not be significantly lowered. Therapeutic nucleic acid molecules delivered exogenously are optimally stable within cells until translation of the target RNA has been inhibited long enough to reduce the levels of the undesirable protein. This period of time varies between hours to days depending upon the disease state. Clearly, nucleic acid molecules must be resistant to nucleases in order to function as effective intracellular therapeutic agents. Improvements in the chemical synthesis of RNA and DNA (Wincott et al., 1995 Nucleic Acids Res. 23, 2677; Caruthers et al., 1992, Methods in Enzymology 211,3-19 (incorporated by reference herein) have expanded the ability to modify nucleic acid molecules by introducing nucleotide modifications to enhance their nuclease stability as described above.

[0120] Use of the nucleic acid-based molecules of the invention can lead to better treatment of the disease progression by affording the possibility of combination therapies (e.g., multiple antisense or enzymatic nucleic acid molecules targeted to different genes, nucleic acid molecules coupled with known small molecule inhibitors, or intermittent treatment with combinations of molecules (including different motifs) and/or other chemical or biological molecules). The treatment of patients with nucleic acid molecules can also include combinations of different types of nucleic acid molecules.

[0121] Therapeutic nucleic acid molecules (e.g., enzymatic nucleic acid molecules and antisense nucleic acid molecules) delivered exogenously are optimally stable within cells until translation of the target RNA has been inhibited long enough to reduce the levels of the undesirable protein. This period of time varies between hours to days depending upon the disease state. These nucleic acid molecules should be resistant to nucleases in order to function as effective intracellular therapeutic agents. Improvements in the chemical synthesis of nucleic acid molecules described in the instant invention and in the art have expanded the ability to modify nucleic acid molecules by introducing nucleotide modifications to enhance their nuclease stability as described above.

[0122] In another embodiment, nucleic acid catalysts having chemical modifications that maintain or enhance enzymatic activity are provided. Such nucleic acids are also generally more resistant to nucleases than unmodified nucleic acid. Thus, in a cell and/or in vivo the activity of the nucleic acid may not be significantly lowered. As exemplified herein such enzymatic nucleic acids are useful in a cell and/or in vivo even if activity over all is reduced 10 fold (Burgin et al., 1996, Biochemistry, 35, 14090). Such enzymatic nucleic acids herein are said to “maintain” the enzymatic activity of an all RNA ribozyme or all DNA DNAzyme.

[0123] In another aspect the nucleic acid molecules comprise a 5′ and/or a 3′-cap structure.

[0124] By “cap structure” is meant chemical modifications, which have been incorporated at either terminus of the oligonucleotide (see for example Wincott et al., WO 97/26270, incorporated by reference herein). These terminal modifications protect the nucleic acid molecule from exonuclease degradation, and can help in delivery and/or localization within a cell. The cap can be present at the 5′-terminus (5′-cap) or at the 3′-terminus (3′-cap) or can be present on both terminus. In non-limiting examples, the 5′-cap includes inverted abasic residue (moiety), 4′,5′-methylene nucleotide; 1-(beta-D-erythrofuranosyl) nucleotide, 4′-thio nucleotide, carbocyclic nucleotide; 1,5-anhydrohexitol nucleotide; L-nucleotides; alpha-nucleotides; modified base nucleotide; phosphorodithioate linkage; threo-pentofuranosyl nucleotide; acyclic 3′,4′-seco nucleotide; acyclic 3,4-dihydroxybutyl nucleotide; acyclic 3,5-dihydroxypentyl nucleotide, 3′-3′-inverted nucleotide moiety; 3′-3′-inverted abasic moiety; 3′-2′-inverted nucleotide moiety; 3′-2′-inverted abasic moiety; 1,4-butanediol phosphate; 3′-phosphoramidate; hexylphosphate; aminohexyl phosphate; 3′-phosphate; 3′-phosphorothioate; phosphorodithioate; or bridging or non-bridging methylphosphonate moiety (for more details see Wincott et al., International PCT publication No. WO 97/26270, incorporated by reference herein).

[0125] In another embodiment the 3′-cap includes, for example 4′,5′-methylene nucleotide; 1-(beta-D-erythrofuranosyl) nucleotide; 4′-thio nucleotide, carbocyclic nucleotide; 5′-amino-alkyl phosphate; 1,3-diamino-2-propyl phosphate, 3-aminopropyl phosphate; 6-aminohexyl phosphate; 1,2-aminododecyl phosphate; hydroxypropyl phosphate; 1,5-anhydrohexitol nucleotide; L-nucleotide; alpha-nucleotide; modified base nucleotide; phosphorodithioate; threopentofuranosyl nucleotide; acyclic 3′,4′-seco nucleotide; 3,4-dihydroxybutyl nucleotide; 3,5-dihydroxypentyl nucleotide, 5′-5′-inverted nucleotide moiety; 5′-5′-inverted abasic moiety; 5′-phosphoramidate; 5′-phosphorothioate; 1,4-butanediol phosphate; 5′-amino; bridging and/or non-bridging 5′-phosphoramidate, phosphorothioate and/or phosphorodithioate, bridging or non bridging methylphosphonate and 5′-mercapto moieties (for more details see Beaucage and Iyer, 1993, Tetrahedron 49, 1925; incorporated by reference herein).

[0126] By the term “non-nucleotide” is meant any group or compound which can be incorporated into a nucleic acid chain in the place of one or more nucleotide units, including either sugar and/or phosphate substitutions, and allows the remaining bases to exhibit their enzymatic activity. The group or compound is abasic in that it does not contain a commonly recognized nucleotide base, such as adenosine, guanine, cytosine, uracil or thymine.

[0127] An “alkyl” group refers to a saturated aliphatic hydrocarbon, including straight-chain, branched-chain, and cyclic alkyl groups. Preferably, the alkyl group has 1 to 12 carbons. More preferably it is a lower alkyl of from 1 to 7 carbons, more preferably 1 to 4 carbons. The alkyl group can be substituted or unsubstituted. When substituted the substituted group(s) is preferably, hydroxyl, cyano, alkoxy, ═O, ═S, NO2 or N(CH3)2, amino, or SH. The term also includes alkenyl groups which are unsaturated hydrocarbon groups containing at least one carbon-carbon double bond, including straight-chain, branched-chain, and cyclic groups. Preferably, the alkenyl group has 1 to 12 carbons. More preferably it is a lower alkenyl of from 1 to 7 carbons, more preferably 1 to 4 carbons. The alkenyl group can be substituted or unsubstituted. When substituted the substituted group(s) is preferably, hydroxyl, cyano, alkoxy, ═O, ═S, NO2, halogen, N(CH3)2, amino, or SH. The term “alkyl” also includes alkynyl groups which have an unsaturated hydrocarbon group containing at least one carbon-carbon triple bond, including straight-chain, branched-chain, and cyclic groups. Preferably, the alkynyl group has 1 to 12 carbons. More preferably it is a lower alkynyl of from 1 to 7 carbons, more preferably 1 to 4 carbons. The alkynyl group can be substituted or unsubstituted. When substituted the substituted group(s) is preferably, hydroxyl, cyano, alkoxy, ═O, ═S, NO2 or N(CH3)2, amino or SH.

[0128] Such alkyl groups can also include aryl, alkylaryl, carbocyclic aryl, heterocyclic aryl, amide and ester groups. An “aryl” group refers to an aromatic group which has at least one ring having a conjugated p electron system and includes carbocyclic aryl, heterocyclic aryl and biaryl groups, all of which can be optionally substituted. The preferred substituent(s) of aryl groups are halogen, trihalomethyl, hydroxyl, SH, OH, cyano, alkoxy, alkyl, alkenyl, alkynyl, and amino groups. An “alkylaryl” group refers to an alkyl group (as described above) covalently joined to an aryl group (as described above). Carbocyclic aryl groups are groups wherein the ring atoms on the aromatic ring are all carbon atoms. The carbon atoms are optionally substituted. Heterocyclic aryl groups are groups having from 1 to 3 heteroatoms as ring atoms in the aromatic 18 ring and the remainder of the ring atoms are carbon atoms. Suitable heteroatoms include oxygen, sulfur, and nitrogen, and include furanyl, thienyl, pyridyl, pyrrolyl, N-lower alkyl pyrrolo, pyrimidyl, pyrazinyl, imidazolyl and the like, all optionally substituted. An “amide” refers to an —C(O)—NH—R, where R is either alkyl, aryl, alkylaryl or hydrogen. An “ester” refers to an —C(O)—OR′, where R is either alkyl, aryl, alkylaryl or hydrogen.

[0129] By “nucleotide” is meant a heterocyclic nitrogenous base in N-glycosidic linkage with a phosphorylated sugar. Nucleotides are recognized in the art to include natural bases (standard), and modified bases well known in the art. Such bases are generally located at the 1′ position of a nucleotide sugar moiety. Nucleotides generally comprise a base, sugar and a phosphate group. The nucleotides can be unmodified or modified at the sugar, phosphate and/or base moiety, (also referred to interchangeably as nucleotide analogs, modified nucleotides, non-natural nucleotides, non-standard nucleotides and other; see for example, Usman and McSwiggen, supra; Eckstein et al., International PCT Publication No. WO 92/07065; Usman et al., International PCT Publication No. WO 93/15187; Uhlman & Peyman, supra all are hereby incorporated by reference herein). There are several examples of modified nucleic acid bases known in the art as summarized by Limbach et al., 1994, Nucleic Acids Res. 22, 2183. Some of the non-limiting examples of chemically modified and other natural nucleic acid bases that can be introduced into nucleic acids include, for example, inosine, purine, pyridin-4-one, pyridin-2-one, phenyl, pseudouracil, 2, 4, 6-trimethoxy benzene, 3-methyl uracil, dihydrouridine, naphthyl, aminophenyl, 5-alkylcytidines (e.g., 5-methylcytidine), 5-alkyluridines (e.g., ribothymidine), 5-halouridine (e.g., 5-bromouridine) or 6-azapyrimidines or 6-alkylpyrimidines (e.g. 6-methyluridine), propyne, quesosine, 2-thiouridine, 4-thiouridine, wybutosine, wybutoxosine, 4-acetylcytidine, 5-(carboxyhydroxymethyl)uridine, 5 ′-carboxymethylaminomethyl-2-thiouridine, 5-carboxymethylaminomethyluridine, beta-D-galactosylqueosine, 1-methyladenosine, 1-methylinosine, 2,2-dimethylguanosine, 3-methylcytidine, 2-methyladenosine, 2-methylguanosine, N6-methyladenosine, 7-methylguanosine, 5-methoxyaminomethyl-2-thiouridine, 5-methylaminomethyluridine, 5-methylcarbonyhnethyluridine, 5-methyloxyuridine, 5-methyl-2-thiouridine, 2-methylthio-N6-isopentenyladenosine, beta-D-mannosylqueosine, uridine-5-oxyacetic acid, 2-thiocytidine, threonine derivatives and others (Burgin et al., 1996, Biochemistry, 35, 14090; Uhlman & Peyman, supra). By “modified bases” in this aspect is meant nucleotide bases other than adenine, guanine, cytosine and uracil at 1′ position or their equivalents; such bases can be used at any position, for example, within the catalytic core of an enzymatic nucleic acid molecule and/or in the substrate-binding regions of the nucleic acid molecule.

[0130] By “nucleoside” is meant a heterocyclic nitrogenous base in N-glycosidic linkage with a sugar. Nucleosides are recognized in the art to include natural bases (standard), and modified bases well known in the art. Such bases are generally located at the 1′ position of a nucleoside sugar moiety. Nucleosides generally comprise a base and sugar group. The nucleosides can be unmodified or modified at the sugar, and/or base moiety, (also referred to interchangeably as nucleoside analogs, modified nucleosides, non-natural nucleosides, non-standard nucleosides and other; see for example, Usman and McSwiggen, supra; Eckstein et al., International PCT Publication No. WO 92/07065; Usman et al., International PCT Publication No. WO 93/15187; Uhlman & Peyman, supra all are hereby incorporated by reference herein). There are several examples of modified nucleic acid bases known in the art as summarized by Limbach et al., 1994, Nucleic Acids Res. 22, 2183. Some of the non-limiting examples of chemically modified and other natural nucleic acid bases that can be introduced into nucleic acids include, inosine, purine, pyridin-4-one, pyridin-2-one, phenyl, pseudouracil, 2, 4, 6-trimethoxy benzene, 3-methyl uracil, dihydrouridine, naphthyl, aminophenyl, 5-alkylcytidines (e.g., 5-methylcytidine), 5-alkyluridines (e.g., ribothymidine), 5-halouridine (e.g., 5-bromouridine) or 6-azapyrimidines or 6-alkylpyrimidines (e.g. 6-methyluridine), propyne, quesosine, 2-thiouridine, 4-thiouridine, wybutosine, wybutoxosine, 4-acetylcytidine, 5-(carboxyhydroxymethyl)uridine, 5′-carboxyrnethylaminomethyl-2-thiouridine, 5-carboxymethylaminomethyluridine, □-D-galactosylqueosine, 1-methyladenosine, 1-methylinosine, 2,2-dimethylguanosine, 3-methylcytidine, 2-methyladenosine, 2-methylguanosine, N6-methyladenosine, 7-methylguanosine, 5-methoxyaminomethyl-2-thiouridine, 5-methylaminomethyluridine, 5-methylcarbonylmethyluridine, 5-methyloxyuridine, 5-methyl-2-thiouridine, 2-methylthio-N6-isopentenyladenosine, beta-D-mannosylqueosine, uridine-5-oxyacetic acid, 2-thiocytidine, threonine derivatives and others (Burgin et al., 1996, Biochemistry, 35, 14090; Uhlman & Peyman, supra). By “modified bases” in this aspect is meant nucleoside bases other than adenine, guanine, cytosine and uracil at 1′ position or their equivalents; such bases can be used at any position, for example, within the catalytic core of an enzymatic nucleic acid molecule and/or in the substrate-binding regions of the nucleic acid molecule.

[0131] In one embodiment, the invention features modified enzymatic nucleic acid molecules with phosphate backbone modifications comprising one or more phosphorothioate, phosphorodithioate, methylphosphonate, morpholino, amidate carbamate, carboxymethyl, acetamidate, polyamide, sulfonate, sulfonamide, sulfamate, formacetal, thioformacetal, and/or alkylsilyl, substitutions. For a review of oligonucleotide backbone modifications see Hunziker and Leumann, 1995, Nucleic Acid Analogues: Synthesis and Properties, in Modern Synthetic Methods, VCH, 331-417, and Mesmaeker et al., 1994, Novel Backbone Replacements for Oligonucleotides, in Carbohydrate Modifications in Antisense Research, ACS, 24-39. These references are hereby incorporated by reference herein.

[0132] By “abasic” is meant sugar moieties lacking a base or having other chemical groups in place of a base at the 1′ position, for example a 3′,3′-linked or 5′,5′-linked deoxyabasic ribose derivative (for more details see Wincott et al., International PCT publication No. WO 97/26270).

[0133] By “unmodified nucleoside” is meant one of the bases adenine, cytosine, guanine, thymine, uracil joined to the 1′ carbon of β-D-ribo-furanose.

[0134] By “modified nucleoside” is meant any nucleotide base which contains a modification in the chemical structure of an unmodified nucleotide base, sugar and/or phosphate.

[0135] In connection with 2′-modified nucleotides as described for the present invention, by “amino” is meant 2′-NH₂ or 2′-O—NH₂, which can be modified or unmodified. Such modified groups are described, for example, in Eckstein et al., U.S. Pat. No. 5,672,695 and Matulic-Adamic et al., WO 98/28317, respectively, which are both incorporated by reference in their entireties.

[0136] Various modifications to nucleic acid (e.g., antisense and ribozyme) structure can be made to enhance the utility of these molecules. For example, such modifications can enhance shelf-life, half-life in vitro, stability, and ease of introduction of such oligonucleotides to the target site, including e.g., enhancing penetration of cellular membranes and conferring the ability to recognize and bind to targeted cells.

[0137] Use of these molecules can lead to better treatment of the disease progression by affording the possibility of combination therapies (e.g., multiple enzymatic nucleic acid molecules targeted to different genes, enzymatic nucleic acid molecules coupled with known small molecule inhibitors, or intermittent treatment with combinations of enzymatic nucleic acid molecules (including different enzymatic nucleic acid molecule motifs) and/or other chemical or biological molecules). The treatment of patients with nucleic acid molecules can also include combinations of different types of nucleic acid molecules. Therapies can be devised which include a mixture of enzymatic nucleic acid molecules (including different enzymatic nucleic acid molecule motifs), antisense and/or 2-5A chimera molecules to one or more targets to alleviate symptoms of a disease.

[0138] Administration of Nucleic Acid Molecules

[0139] Methods for the delivery of nucleic acid molecules are described in Akhtar et al., 1992, Trends Cell Bio., 2, 139; and Delivery Strategies for Antisense Oligonucleotide Therapeutics, ed. Akhtar, 1995 which are both incorporated herein by reference. Sullivan et al., PCT WO 94/02595, further describes the general methods for delivery of enzymatic RNA molecules. These protocols can be utilized for the delivery of virtually any nucleic acid molecule. Nucleic acid molecules can be administered to cells by a variety of methods known to those familiar to the art, including, but not restricted to, encapsulation in liposomes, by iontophoresis, or by incorporation into other vehicles, such as hydrogels, cyclodextrins, biodegradable nanocapsules, and bioadhesive microspheres. Alternatively, the nucleic acid/vehicle combination is locally delivered by direct injection or by use of an infusion pump. Other routes of delivery include, but are not limited to oral (tablet or pill form) and/or intrathecal delivery (Gold, 1997, Neuroscience, 76, 1153-1158). Other approaches include the use of various transport and carrier systems, for example though the use of conjugates and biodegradable polymers. For a comprehensive review on drug delivery strategies including CNS delivery, see Ho et al., 1999, Curr. Opin. Mol. Ther., 1, 336-343 and Jain, Drug Delivery Systems: Technologies and Commercial Opportunities, Decision Resources, 1998 and Groothuis et al., 1997, J. NeuroVirol., 3, 387-400. More detailed descriptions of nucleic acid delivery and administration are provided in Sullivan et al., supra, Draper et al., PCT WO93/23569, Beigelman et al., PCT WO99/05094, and Klimuk et al., PCT WO99/04819 all of which have been incorporated by reference herein.

[0140] The molecules of the instant invention can be used as pharmaceutical agents. Pharmaceutical agents prevent, inhibit the occurrence, or treat (alleviate a symptom to some extent, preferably all of the symptoms) of a disease state in a patient.

[0141] The negatively charged polynucleotides of the invention can be administered (e.g., RNA, DNA or protein) and introduced into a patient by any standard means, with or without stabilizers, buffers, and the like, to form a pharmaceutical composition. When it is desired to use a liposome delivery mechanism, standard protocols for formation of liposomes can be followed. The compositions of the present invention can also be formulated and used as tablets, capsules or elixirs for oral administration; suppositories for rectal administration; sterile solutions; suspensions for injectable administration; and the other compositions known in the art.

[0142] The present invention also includes pharmaceutically acceptable formulations of the compounds described. These formulations include salts of the above compounds, e.g., acid addition salts, for example, salts of hydrochloric, hydrobromic, acetic acid, and benzene sulfonic acid.

[0143] A pharmacological composition or formulation refers to a composition or formulation in a form suitable for administration, e.g., systemic administration, into a cell or patient, preferably a human. Suitable forms, in part, depend upon the use or the route of entry, for example oral, transdermal, or by injection. Such forms should not prevent the composition or formulation from reaching a target cell (i.e., a cell to which the negatively charged polymer is desired to be delivered to). For example, pharmacological compositions injected into the blood stream should be soluble. Other factors are known in the art, and include considerations such as toxicity and forms which prevent the composition or formulation from exerting its effect.

[0144] By “systemic administration” is meant in vivo systemic absorption or accumulation of drugs in the blood stream followed by distribution throughout the entire body. Administration routes which lead to systemic absorption include, without limitations: intravenous, subcutaneous, intraperitoneal, inhalation, oral, intrapulmonary and intramuscular. Each of these administration routes expose the desired negatively charged polymers, e.g., nucleic acids, to an accessible diseased tissue. The rate of entry of a drug into the circulation has been shown to be a function of molecular weight or size. The use of a liposome or other drug carrier comprising the compounds of the instant invention can potentially localize the drug, for example, in certain tissue types, such as the tissues of the reticular endothelial system (RES). A liposome formulation which can facilitate the association of drug with the surface of cells, such as, lymphocytes and macrophages is also useful. This approach can provide enhanced delivery of the drug to target cells by taking advantage of the specificity of macrophage and lymphocyte immune recognition of abnormal cells, such as cancer cells.

[0145] By pharmaceutically acceptable formulation is meant, a composition or formulation that allows for the effective distribution of the nucleic acid molecules of the instant invention in the physical location most suitable for their desired activity. Non-limiting examples of agents suitable for formulation with the nucleic acid molecules of the instant invention include: PEG conjugated nucleic acids, phospholipid conjugated nucleic acids, nucleic acids containing lipophilic moieties, phosphorothioates, P-glycoprotein inhibitors (such as Pluronic P85) which can enhance entry of drugs into various tissues, for exaple the CNS (Jolliet-Riant and Tillement, 1999, Fundam. Clin. Pharmacol., 13, 16-26); biodegradable polymers, such as poly (DL-lactide-coglycolide) microspheres for sustained release delivery after implantation (Emerich, DF et al, 1999, Cell Transplant, 8, 47-58) Alkermes, Inc. Cambridge, Mass.; and loaded nanoparticles, such as those made of polybutylcyanoacrylate, which can deliver drugs across the blood brain barrier and can alter neuronal uptake mechanisms (Prog Neuropsychopharmacol Biol Psychiatry, 23, 941-949, 1999). Other non-limiting examples of delivery strategies, including CNS delivery of the nucleic acid molecules of the instant invention include material described in Boado et al., 1998, J. Pharm. Sci., 87, 1308-1315; Tyler et al, 1999, FEBS Lett., 421, 280-284; Pardridge et al., 1995, PNAS USA., 92, 5592-5596; Boado, 1995, Adv. Drug Delivery Rev., 15, 73-107; Aldrian-Herrada et al., 1998, Nucleic Acids Res., 26, 4910-4916; and Tyler et al., 1999, PNAS USA., 96, 7053-7058. All these references are hereby incorporated herein by reference.

[0146] The invention also features the use of the composition comprising surface-modified liposomes containing poly (ethylene glycol) lipids (PEG-modified, or long-circulating liposomes or stealth liposomes). Nucleic acid molecules of the invention can also comprise covalently attached PEG molecules of various molecular weights. These formulations offer a method for -increasing the accumulation of drugs in target tissues. This class of drug carriers resists opsonization and elimination by the mononuclear phagocytic system (MPS or RES), thereby enabling longer blood circulation times and enhanced tissue exposure for the encapsulated drug (Lasic et al. Chem. Rev. 1995, 95, 2601-2627; Ishiwata et al., Chem. Pharm. Bull. 1995, 43, 1005-1011). Such liposomes have been shown to accumulate selectively in tumors, presumably by extravasation and capture in the neovascularized target tissues (Lasic et al., Science 1995, 267, 1275-1276; Oku et al.,1995, Biochim. Biophys. Acta, 1238, 86-90). The long-circulating liposomes enhance the pharmacokinetics and pharmacodynamics of DNA and RNA, particularly compared to conventional cationic liposomes which are known to accumulate in tissues of the MPS (Liu et al., J. Biol. Chem. 1995, 42, 24864-24870; Choi et al., International PCT Publication No. WO 96/10391; Ansell et al., International PCT Publication No. WO 96/10390; Holland et al., International PCT Publication No. WO 96/10392; all of which are incorporated by reference herein). Long-circulating liposomes are also likely to protect drugs from nuclease degradation to a greater extent compared to cationic liposomes, based on their ability to avoid accumulation in metabolically aggressive MPS tissues such as the liver and spleen. All of these references are incorporated by reference herein.

[0147] The present invention also includes compositions prepared for storage or administration which include a pharmaceutically effective amount of the desired compounds in a pharmaceutically acceptable carrier or diluent. Acceptable carriers or diluents for therapeutic use are well known in the pharmaceutical art, and are described, for example, in Remington's Pharmaceutical Sciences, Mack Publishing Co. (A.R. Gennaro edit. 1985) hereby incorporated by reference herein. For example, preservatives, stabilizers, dyes and flavoring agents can be provided. These include sodium benzoate, sorbic acid and esters of p-hydroxybenzoic acid. In addition, antioxidants and suspending agents can be used.

[0148] A pharmaceutically effective dose is that dose required to prevent, inhibit the occurrence, or treat (alleviate a symptom to some extent, preferably all of the symptoms) of a disease state. The pharmaceutically effective dose depends on the type of disease, the composition used, the route of administration, the type of mammal being treated, the physical characteristics of the specific mammal under consideration, concurrent medication, and other factors which those skilled in the medical arts will recognize. Generally, an amount between 0.1 mg/kg and 100 mg/kg body weight/day of active ingredients is administered dependent upon potency of the negatively charged polymer.

[0149] The nucleic acid molecules of the invention and formulations thereof can be administered orally, topically, parenterally, by inhalation or spray or rectally in dosage unit formulations containing conventional non-toxic pharmaceutically acceptable carriers, adjuvants and vehicles. The term parenteral as used herein includes percutaneous, subcutaneous, intravascular (e.g., intravenous), intramuscular, or intrathecal injection or infusion techniques and the like. In addition, there is provided a pharmaceutical formulation comprising a nucleic acid molecule of the invention and a pharmaceutically acceptable carrier. One or more nucleic acid molecules of the invention can be present in association with one or more non-toxic pharmaceutically acceptable carriers and/or diluents and/or adjuvants, and if desired other active ingredients. The pharmaceutical compositions containing nucleic acid molecules of the invention can be in a form suitable for oral use, for example, as tablets, troches, lozenges, aqueous or oily suspensions, dispersible powders or granules, emulsion, hard or soft capsules, or syrups or elixirs.

[0150] Compositions intended for oral use can be prepared according to any method known to the art for the manufacture of pharmaceutical compositions and such compositions can contain one or more such sweetening agents, flavoring agents, coloring agents or preservative agents in order to provide pharmaceutically elegant and palatable preparations. Tablets contain the active ingredient in admixture with non-toxic pharmaceutically acceptable excipients that are suitable for the manufacture of tablets. These excipients can be for example, inert diluents, such as calcium carbonate, sodium carbonate, lactose, calcium phosphate or sodium phosphate; granulating and disintegrating agents, for example, corn starch, or alginic acid; binding agents, for example starch, gelatin or acacia, and lubricating agents, for example magnesium stearate, stearic acid or talc. The tablets can be uncoated or they can be coated by known techniques. In some cases such coatings can be prepared by known techniques to delay disintegration and absorption in the gastrointestinal tract and thereby provide a sustained action over a longer period. For example, a time delay material such as glyceryl monosterate or glyceryl distearate can be employed.

[0151] Formulations for oral use can also be presented as hard gelatin capsules wherein the active ingredient is mixed with an inert solid diluent, for example, calcium carbonate, calcium phosphate or kaolin, or as soft gelatin capsules wherein the active ingredient is mixed with water or an oil medium, for example peanut oil, liquid paraffin or olive oil.

[0152] Aqueous suspensions contain the active materials in admixture with excipients suitable for the manufacture of aqueous suspensions. Such excipients are suspending agents, for example sodium carboxymethylcellulose, methylcellulose, hydropropyl-methylcellulose, sodium alginate, polyvinylpyrrolidone, gum tragacanth and gum acacia; dispersing or wetting agents can be a naturally-occurring phosphatide, for example, lecithin, or condensation products of an alkylene oxide with fatty acids, for example polyoxyethylene stearate, or condensation products of ethylene oxide with long chain aliphatic alcohols, for example heptadecaethyleneoxycetanol, or condensation products of ethylene oxide with partial esters derived from fatty acids and a hexitol such as polyoxyethylene sorbitol monooleate, or condensation products of ethylene oxide with partial esters derived from fatty acids and hexitol anhydrides, for example polyethylene sorbitan monooleate. The aqueous suspensions can also contain one or more preservatives, for example ethyl, or n-propyl p-hydroxybenzoate, one or more coloring agents, one or more flavoring agents, and one or more sweetening agents, such as sucrose or saccharin.

[0153] Oily suspensions can be formulated by suspending the active ingredients in a vegetable oil, for example arachis oil, olive oil, sesame oil or coconut oil, or in a mineral oil such as liquid paraffin. The oily suspensions can contain a thickening agent, for example beeswax, hard paraffin or cetyl alcohol. Sweetening agents and flavoring agents can be added to provide palatable oral preparations. These compositions can be preserved by the addition of an anti-oxidant such as ascorbic acid.

[0154] Dispersible powders and granules suitable for preparation of an aqueous suspension by the addition of water provide the active ingredient in admixture with a dispersing or wetting agent, suspending agent and one or more preservatives. Suitable dispersing or wetting agents or suspending agents are exemplified by those already mentioned above. Additional excipients, for example sweetening, flavoring and coloring agents, can also be present.

[0155] Pharmaceutical compositions of the invention can also be in the form of oil-in-water emulsions. The oily phase can be a vegetable oil or a mineral oil or mixtures of these. Suitable emulsifying agents can be naturally-occurring gums, for example gum acacia or gum tragacanth, naturally-occurring phosphatides, for example soy bean, lecithin, and esters or partial esters derived from fatty acids and hexitol, anhydrides, for example sorbitan monooleate, and condensation products of the said partial esters with ethylene oxide, for example polyoxyethylene sorbitan monooleate. The emulsions can also contain sweetening and flavoring agents.

[0156] Syrups and elixirs can be formulated with sweetening agents, for example glycerol, propylene glycol, sorbitol, glucose or sucrose. Such formulations can also contain a demulcent, a preservative and flavoring and coloring agents. The pharmaceutical compositions can be in the form of a sterile injectable aqueous or oleaginous suspension. This suspension can be formulated according to the known art using those suitable dispersing or wetting agents and suspending agents that have been mentioned above. The sterile injectable preparation can also be a sterile injectable solution or suspension in a non-toxic parentally acceptable diluent or solvent, for example as a solution in 1,3-butanediol. Among the acceptable vehicles and solvents that can be employed are water, Ringer's solution and isotonic sodium chloride solution. In addition, sterile, fixed oils are conventionally employed as a solvent or suspending medium. For this purpose any bland fixed oil can be employed including synthetic mono-or diglycerides. In addition, fatty acids such as oleic acid find use in the preparation of injectables.

[0157] The nucleic acid molecules of the invention can also be administered in the form of suppositories, e.g., for rectal administration of the drug. These compositions can be prepared by mixing the drug with a suitable non-irritating excipient that is solid at ordinary temperatures but liquid at the rectal temperature and will therefore melt in the rectum to release the drug. Such materials include cocoa butter and polyethylene glycols.

[0158] Nucleic acid molecules of the invention can be administered parenterally in a sterile medium. The drug, depending on the vehicle and concentration used, can either be suspended or dissolved in the vehicle. Advantageously, adjuvants such as local anesthetics, preservatives and buffering agents can be dissolved in the vehicle. Dosage levels of the order of from about 0.1 mg to about 140 mg per kilogram of body weight per day are useful in the treatment of the above-indicated conditions (about 0.5 mg to about 7 g per patient per day). The amount of active ingredient that can be combined with the carrier materials to produce a single dosage form varies depending upon the host treated and the particular mode of administration. Dosage unit forms generally contain between from about 1mg to about 500 mg of an active ingredient.

[0159] It is understood that the specific dose level for any particular patient depends upon a variety of factors including the activity of the specific compound employed, the age, body weight, general health, sex, diet, time of administration, route of administration, and rate of excretion, drug combination and the severity of the particular disease undergoing therapy. For administration to non-human animals, the composition can also be added to the animal feed or drinking water. It can be convenient to formulate the animal feed and drinking water compositions so that the animal takes in a therapeutically appropriate quantity of the composition along with its diet. It can also be convenient to present the composition as a premix for addition to the feed or drinking water.

[0160] The nucleic acid molecules of the present invention can also be administered to a patient in combination with other therapeutic compounds to increase the overall therapeutic effect. The use of multiple compounds to treat an indication can increase the beneficial effects while reducing the presence of side effects.

[0161] Alternatively, certain of the nucleic acid molecules of the instant invention can be expressed within cells from eukaryotic promoters (e.g., Izant and Weintraub, 1985, Science, 229, 345; McGarry and Lindquist, 1986, Proc. Natl. Acad. Sci., USA 83, 399; Scanlon et al., 1991, Proc. Natl. Acad. Sci. USA, 88, 10591-5; Kashani-Sabet et al., 1992, Antisense Res. Dev., 2, 3-15; Dropulic et al, 1992, J. Virol., 66, 1432-41; Weerasinghe et al., 1991, J. Virol., 65, 5531-4; Ojwang et al., 1992, Proc. Natl. Acad. Sci. USA, 89, 10802-6; Chen et al., 1992, Nucleic Acids Res., 20, 4581-9; Sarver et al., 1990 Science, 247, 1222-1225; Thompson et al., 1995, Nucleic Acids Res., 23, 2259; Good et al., 1997, Gene Therapy, 4, 45; all of these references are hereby incorporated in their totalities by reference herein). Those skilled in the art realize that any nucleic acid can be expressed in eukaryotic cells from the appropriate DNA/RNA vector. The activity of such nucleic acids can be augmented by their release from the primary transcript by a enzymatic nucleic acid (Draper et al, PCT WO 93/23569, and Sullivan et al., PCT WO 94/02595; Ohkawa et al., 1992, Nucleic Acids Symp. Ser., 27, 15-6; Taira et al., 1991, Nucleic Acids Res., 19, 5125-30; Ventura et al., 1993, Nucleic Acids Res., 21, 3249-55; Chowrira et al., 1994, J. Biol. Chem., 269, 25856; all of these references are hereby incorporated in their totalities by reference herein). Gene therapy approaches specific to the CNS are described by Blesch et al., 2000, Drug News Perspect., 13, 269-280; Peterson et al., 2000, Cent. Nerv. Syst. Dis., 485-508; Peel and Klein, 2000, J. Neurosci. Methods, 98, 95-104; Hagihara et al., 2000, Gene Ther., 7, 759-763; and Herrlinger et al., 2000, Methods Mol. Med., 35, 287-312. AAV-mediated delivery of nucleic acid to cells of the nervous system is further described by Kaplitt et al., U.S. Pat. No. 6,180,613.

[0162] In another aspect of the invention, RNA molecules of the present invention are preferably expressed from transcription units (see for example Couture et al., 1996, TIG., 12, 510) inserted into DNA or RNA vectors. The recombinant vectors are preferably DNA plasmids or viral vectors. Ribozyme expressing viral vectors can be constructed based on, but not limited to, adeno-associated virus, retrovirus, adenovirus, or alphavirus. Preferably, the recombinant vectors capable of expressing the nucleic acid molecules are delivered as described above, and persist in target cells. Alternatively, viral vectors can be used that provide for transient expression of nucleic acid molecules. Such vectors can be repeatedly administered as necessary. Once expressed, the nucleic acid molecule binds to the target mRNA. Delivery of nucleic acid molecule expressing vectors can be systemic, such as by intravenous or intramuscular administration, by administration to target cells ex-planted from the patient followed by reintroduction into the patient, or by any other means that would allow for introduction into the desired target cell (for a review see Couture et al., 1996, TIG., 12, 510).

[0163] In one aspect the invention features an expression vector comprising a nucleic acid sequence encoding at least one of the nucleic acid molecules of the instant invention is disclosed.

[0164] The nucleic acid sequence encoding the nucleic acid molecule of the instant invention is operable linked in a manner which allows expression of that nucleic acid molecule. In another aspect the invention features an expression vector comprising: a) a transcription initiation region (e.g., eukaryotic pol I, II or III initiation region); b) a transcription termination region (e.g., eukaryotic pol I, II or III termination region); c) a nucleic acid sequence encoding at least one of the nucleic acid catalyst of the instant invention; and wherein said sequence is operably linked to said initiation region and said termination region, in a manner which allows expression and/or delivery of said nucleic acid molecule. The vector can optionally include an open reading frame (ORF) for a protein operably linked on the 5′ side or the 3′-side of the sequence encoding the nucleic acid catalyst of the invention; and/or an intron (intervening sequences). Transcription of the nucleic acid molecule sequences are driven from a promoter for eukaryotic RNA polymerase I (pol I), RNA polymerase II (pol II), or RNA polymerase III (pol III). Transcripts from pol III or pol III promoters are expressed at high levels in all cells; the levels of a given pol II promoter in a given cell type depends on the nature of the gene regulatory sequences (enhancers, silencers, etc.) present nearby. Prokaryotic RNA polymerase promoters are also used, providing that the prokaryotic RNA polymerase enzyme is expressed in the appropriate cells (Elroy-Stein and Moss, 1990, Proc. Natl. Acad. Sci. USA, 87, 6743-7; Gao and Huang 1993, Nucleic Acids Res., 21, 2867-72; Lieber et al., 1993, Methods Enzymol., 217, 47-66; Zhou et al., 1990, Mol. Cell. Biol., 10, 4529-37). All of these references are incorporated by reference herein. Several investigators have demonstrated that nucleic acid molecules, such as ribozymes expressed from such promoters can function in mammalian cells (e.g. Kashani-Sabet et al., 1992, Antisense Res. Dev., 2, 3-15; Ojwang et al., 1992, Proc. Natl. Acad. Sci. U S A, 89, 10802-6; Chen et al., 1992, Nucleic Acids Res., 20, 4581-9; Yu et al., 1993, Proc. Natl. Acad. Sci. U S A, 90, 6340-4; L'Huillier et al., 1992, EMBO J., 11, 4411-8; Lisziewicz et al., 1993, Proc. Natl. Acad. Sci. U.S. A, 90, 8000-4; Thompson et al., 1995, Nucleic Acids Res., 23, 2259; Sullenger & Cech, 1993, Science, 262, 1566). More specifically, transcription units such as the ones derived from genes encoding U6 small nuclear (snRNA), transfer RNA (tRNA) and adenovirus VA RNA are useful in generating high concentrations of desired RNA molecules such as ribozymes in cells (Thompson et al., supra; Couture and Stinchcomb, 1996, supra; Noonberg et al., 1994, Nucleic Acid Res., 22, 2830; Noonberg et al., U.S. Pat. No. 5,624,803; Good et al., 1997, Gene Ther., 4, 45; Beigelman et al., International PCT Publication No. WO 96/18736; all of these publications are incorporated by reference herein. The above ribozyme transcription units can be incorporated into a variety of vectors for introduction into mammalian cells, including but not restricted to, plasmid DNA vectors, viral DNA vectors (such as adenovirus or adeno-associated virus vectors), or viral RNA vectors (such as retroviral or alphavirus vectors) (for a review see Couture and Stinchcomb, 1996, supra).

[0165] In another aspect the invention features an expression vector comprising nucleic acid sequence encoding at least one of the nucleic acid molecules of the invention, in a manner which allows expression of that nucleic acid molecule. The expression vector comprises in one embodiment; a) a transcription initiation region; b) a transcription termination region; c) a nucleic acid sequence encoding at least one said nucleic acid molecule; and wherein said sequence is operably linked to said initiation region and said termination region, in a manner which allows expression and/or delivery of said nucleic acid molecule.

[0166] In another embodiment the expression vector comprises: a) a transcription initiation region; b) a transcription termination region; c) an open reading frame; d) a nucleic acid sequence encoding at least one said nucleic acid molecule, wherein said sequence is operably linked to the 3′-end of said open reading frame; and wherein said sequence is operably linked to said initiation region, said open reading frame and said termination region, in a manner which allows expression and/or delivery of said nucleic acid molecule. In yet another embodiment the expression vector comprises: a) a transcription initiation region; b) a transcription termination region; c) an intron; d) a nucleic acid sequence encoding at least one said nucleic acid molecule; and wherein said sequence is operably linked to said initiation region, said intron and said termination region, in a manner which allows expression and/or delivery of said nucleic acid molecule.

[0167] In another embodiment, the expression vector comprises: a) a transcription initiation region; b) a transcription termination region; c) an intron; d) an open reading frame; e) a nucleic acid sequence encoding at least one said nucleic acid molecule, wherein said sequence is operably linked to the 3′-end of said open reading frame; and wherein said sequence is operably linked to said initiation region, said intron, said open reading frame and said termination region, in a manner which allows expression and/or delivery of said nucleic acid molecule.

### EXAMPLES

[0168] The following are non-limiting examples showing the selection, isolation, synthesis and activity of nucleic acids of the instant invention.

[0169] The following examples demonstrate the selection and design of Antisense, hammerhead, DNAzyme, NCH, Amberzyme, Zinzyme, or G-Cleaver ribozyme molecules and binding/cleavage sites within EGFR RNA.

### Example 1

### Identification of Potential Target Sites in Human EGFR RNA

[0170] The sequence of human EGFR genes are screened for accessible sites using a computer-folding algorithm. Regions of the RNA that do not form secondary folding structures and contained potential enzymatic nucleic acid molecule and/or antisense binding/cleavage sites are identified. The sequences of these binding/cleavage sites are shown in Tables III-VIII and X.

[0171] Sequences shown in Table X are RNA sequences that are homologous to both EGFR and HER2 genes (the nucleotide position shown is for the EGFR gene, Genbank accession No: NM_{—}005228).

### Example 2

### Selection of Enzymatic Nucleic Acid Cleavage Sites in Human EGFR RNA

[0172] Enzymatic nucleic acid molecule target sites are chosen by analyzing sequences of Human EGFR (Genbank accession No: NM_{—}005228) and prioritizing the sites on the basis of folding. Enzymatic nucleic acid molecules are designed that can bind each target and are individually analyzed by computer folding (Christoffersen et al., 1994 J. Mol. Struc. Theochem, 311, 273; Jaeger et al., 1989, Proc. Natl. Acad. Sci. USA, 86, 7706) to assess whether the enzymatic nucleic acid molecule sequences fold into the appropriate secondary structure. Those enzymatic nucleic acid molecules with unfavorable intramolecular interactions between the binding arms and the catalytic core are eliminated from consideration. As noted below, varying binding arm lengths can be chosen to optimize activity. Generally, at least 5 bases on each arm are able to bind to, or otherwise interact with, the target RNA.

### Example 3

### Chemical Synthesis and Purification of Ribozymes and Antisense for Efficient Cleavage and/or blocking of EGFR RNA

[0173] Enzymatic nucleic acid molecules and antisense constructs are designed to anneal to various sites in the RNA message. The binding arms of the enzymatic nucleic acid molecules are complementary to the target site sequences described above, while the antisense constructs are fully complementary to the target site sequences described above. The enzymatic nucleic acid molecules and antisense constructs were chemically synthesized. The method of synthesis used followed the procedure for normal RNA synthesis as described above and in Usman et al., (1987 J. Am. Chem. Soc., 109, 7845), Scaringe et al., (1990 Nucleic Acids Res., 18, 5433) and Wincott et al., supra, and made use of common nucleic acid protecting and coupling groups, such as dimethoxytrityl at the 5′-end, and phosphoramidites at the 3′-end. The average stepwise coupling yields were typically >98%.

[0174] Enzymatic nucleic acid molecules and antisense constructs are also synthesized from DNA templates using bacteriophage T7 RNA polymerase (Milligan and Uhlenbeck, 1989, Methods Enzymol. 180, 51). Enzymatic nucleic acid molecules and antisense constructs are purified by gel electrophoresis using general methods or are purified by high pressure liquid chromatography (HPLC; See Wincott et al., supra; the totality of which is hereby incorporated herein by reference) and are resuspended in water. The sequences of the chemically synthesized enzymatic nucleic acid molecules used in this study are shown below in Table VIII. The sequences of the chemically synthesized antisense constructs used in this study are complementary sequences to the Substrate sequences shown below as in Table III-VIII and X.

### Example 4

### Enzymatic Nucleic Acid Molecule Cleavage of EGFR RNA Target in vitro

[0175] Enzymatic nucleic acid molecules targeted to the human EGFR RNA are designed and synthesized as described above. These enzymatic nucleic acid molecules can be tested for cleavage activity in vitro, for example, using the following procedure. The target sequences and the nucleotide location within the EGFR RNA are given in Tables III-VIII. Target sequences and the nucleotide location within the EGFR RNA for sequences that can be used to target both EGFR and HER2 are shown in Table X.

[0176] Cleavage Reactions:

[0177] Full-length or partially full-length, internally-labeled target RNA for enzymatic nucleic acid molecule cleavage assay is prepared by in vitro transcription in the presence of [a-³²P] CTP, passed over a G 50 Sephadex column by spin chromatography and used as substrate RNA without further purification. Alternately, substrates are 5′-³²P-end labeled using T4 polynucleotide kinase enzyme. Assays are performed by pre-warming a 2× concentration of purified enzymatic nucleic acid molecule in enzymatic nucleic acid molecule cleavage buffer (50 mM Tris-HCl, pH 7.5 at 37° C., 10 mM MgCl₂) and the cleavage reaction was initiated by adding the 2× enzymatic nucleic acid molecule mix to an equal volume of substrate -.RNA (maximum of 1-5 nM) that was also pre-warmed in cleavage buffer. As an initial screen, assays are carried out for 1 hour at 37° C. using a final concentration of either 40 nM or 1 mM enzymatic nucleic acid molecule, i.e., enzymatic nucleic acid molecule excess. The reaction is quenched by the addition of an equal volume of 95% formamide, 20 mM EDTA, 0.05% bromophenol blue and 0.05% xylene cyanol after which the sample is heated to 95 C for 2 minutes, quick chilled and loaded onto a denaturing polyacrylamide gel. Substrate RNA and the specific RNA cleavage products generated by enzymatic nucleic acid molecule cleavage are visualized on an autoradiograph of the gel. The percentage of cleavage is determined by Phosphor Imager® quantitation of bands representing the intact substrate and the cleavage products.

### Example 5

### Nucleic acid down-regulation of EGFR target RNA in vivo

[0178] Nucleic acid molecules targeted to the human EGFR RNA are designed and synthesized as described above. These nucleic acid molecules can be tested for cleavage activity in vivo, for example using the procedures described below. The target sequences and the nucleotide location within the EGFR RNA are given in Tables III-VIII. Target sequences and the nucleotide location within the EGFR RNA for sequences that can be used to target both EGFR and HER2 are shown in Table X.

### Example 6

### In vivo Models Used to Evaluate the Down-Regulation of EGFR Gene Expression

[0179] A variety of endpoints have been used in cell culture models to evaluate EGFR-mediated effects after treatment with anti-EGFR agents. Phenotypic endpoints include inhibition of cell proliferation, apoptosis assays and reduction of EGJFR protein expression. Because overexpression of EGFR is directly associated with increased proliferation of tumor cells, a proliferation endpoint for cell culture assays is preferably used as a primary screen. There are several methods by which this endpoint can be measured. Following treatment of cells with nucleic acid molecules, cells are allowed to grow (typically 5 days) after which either the cell viability, the incorporation of [³H] thymidine into cellular DNA and/or the cell density can be measured. The assay of cell density is very straightforward and can be performed in a 96-well format using commercially available fluorescent nucleic acid stains (such as SytoOR 13 or CyQuant®). The assay using CyQuant® is described herein

[0180] As a secondary, confirmatory endpoint a nucleic acid-mediated decrease in the level of EGFR RNA and/or EGFR protein expression can be evaluated.

[0181] Validation of Cell Lines and Ribozyme Treatment Conditions

[0182] Two human cell lines (A549 and SKOV-3) that are known to express medium to high levels of EGFR protein are considered for nucleic acid screening. In order to validate these cell lines for EGFR-mediated sensitivity, both cell lines are treated with an EGFR specific antibody, for example mAB IMC-C225 (ImClone) and its effect on cell proliferation is determined. mAB is added to cells at concentrations ranging from 0-8 μM in medium containing either no serum (OptiMem), 0.1% or 0.5% FBS and efficacy is determined via cell proliferation. If maximal inhibition of proliferation (˜50%) in both cell lines is observed after addition of mAB at 0.5 nM in medium containing 0.1% or no FBS, then the fact that both cell lines are sensitive to an anti-EGFR agent (mAB) supports their use in experiments testing anti-EGFR nucleic acid molecules.

[0183] Prior to nucleic acid screening, the choice of the optimal lipid(s) and conditions for nucleic acid delivery is determined empirically for each cell line. Applicant has established a panel of cationic lipids (lipids as described in PCT application WO99/05094) that can be used to deliver nucleic acids to cultured cells and are very useful for cell proliferation assays that are typically 3-5 days in length. (Additional description of useful lipids is provided above, and those skilled in the art are also familiar with a variety of lipids that can be used for delivery of oligonucleotide to cells in culture.) Initially, this panel of lipid delivery vehicles is screened in A549 and SKOV-3 cells using previously established control oligonucleotides. Specific lipids and conditions for optimal delivery are selected for each cell line based on these screens. These conditions are used to deliver EGFR specific nucleic acids to cells for primary (inhibition of cell proliferation) and secondary (decrease in EGFR RNA/protein) efficacy endpoints.

[0184] Primary Screen: Inhibition of Cell Proliferation

[0185] Nucleic acid screens were performed using an automated, high throughput 96-well cell proliferation assay. Cell proliferation was measured over a 5-day treatment period using the nucleic acid stain CyQuant® for determining cell density. The growth of cells treated with enzymatic nucleic acid/lipid complexes were compared to both untreated cells and to cells treated with Scrambled-arm Attenuated core Controls (SAC). SACs can no longer bind to the target site due to the scrambled arm sequence and have nucleotide changes in the core that greatly diminish nucleic acid cleavage. These SACs are used to determine non-specific inhibition of cell growth caused by nucleic acid chemistry (i.e. multiple 2′ O-Me modified nucleotides, a single 2′C-allyl uridine, 4 phosphorothioates and a 3′ inverted abasic). The growth of cells treated with GeneBloc/lipid complexes were compared to both untreated cells and to cells treated with a scrambled control GeneBloc that can no longer bind to the target site due to the scrambled sequence. Lead nucleic acids are chosen from the primary screen based on their ability to inhibit cell proliferation in a specific manner. Dose response assays are carried out on these leads and a subset was advanced into a secondary screen using the level of EGFR protein as an endpoint.

[0186] Secondary Screen: Decrease in EGFR Protein and/or RNA

[0187] A secondary screen that measures the effect of anti-EGFR nucleic acids on EGFR protein and/or RNA levels is used to affirm preliminary findings. A EGFR ELISA for both A549 and SKOV-3 cells can been established and made available for use as an additional endpoint. In addition, a real time RT-PCR assay (TaqMan assay) has been developed to assess EGFR RNA reduction. Dose response activity of nucleic acid molecules of the instant invention can be used to assess both EGFR protein and RNA reduction endpoints.

[0188] Enzymatic Nucleic Acid Mechanism Assays

[0189] A TaqMan® assay for measuring the enzymatic nucleic acid-mediated decrease in EGFR RNA has been established. This assay is based on PCR technology and can measure in real time the production of EGFR mRNA relative to a standard cellular mRNA such as GAPDH. This RNA assay is used to establish proof that lead enzymatic nucleic acids are working through an RNA cleavage mechanism and result in a decrease in the level of EGFR mRNA, thus leading to a decrease in cell surface EGFR protein receptors and a subsequent decrease in tumor cell proliferation.

[0190] Animal Models

[0191] Evaluating the efficacy of anti-EGFR agents in animal models is an important prerequisite to human clinical trials. As in cell culture models, the most EGFR sensitive mouse tumor xenografts are those derived from human carcinoma cells that express high levels of EGFR protein. In a recent study, nude mice bearing human vulvar (A431), lung (A549 and SK-LC-16 NSCL and LX-1) and prostate (PC-3 and TSU-PRI) xenografts were sensitive to the anti-EGFR tyrosine kinase inhibitor ZD 1839 (Iressa), resulting in a partial regression of A431 tumor growth, 70-80% inhibition of tumor growth (A549, SKLC-16, TSU-PRI and PC-3 tumors), and 50-55% inhibition against the LX-1 tumor at a 150 mg kg dose (ip, every 3-4 days×4), (Sirotnak et al., 2000, Clin. Cancer Res., 6, 4885-48892). This same study compared the efficacy of ZD1839 alone or in combination with the commonly used chemotherapeutics, cisplatin, carboplatin, paclitaxel, docetaxel, edatrexate, gemcitabine, vinorelbine. When used in combination with certain chemotherapeutic agents, most notably cisplatin, carboplatin, paclitaxel, docetaxel, and edatrexate, marked response was observed compared to treatment with these agents alone, resulting in partial or complete regression in some cases. The above studies provide proof that inhibition of EGFR expression by anti-EGFR agents causes inhibition of tumor growth in animals.

[0192] Animal Model Development

[0193] Tumor cell lines (A549 and SKOV-3) are characterized to establish their growth curves in mice. These cell lines are implanted into both nude and SCID mice and primary tumor volumes are measured 3 times per week. Growth characteristics of these tumor lines using a Matrigel implantation format can also be established. The use of other cell lines that have been engineered to express high levels of EGFR can also be used in the described studies. The tumor cell line(s) and implantation method that supports the most consistent and reliable tumor growth is used in animal studies testing the lead EGFR nucleic acid(s). Nucleic acids are administered by daily subcutaneous injection or by continuous subcutaneous infusion from Alzet mini osmotic pumps beginning 3 days after tumor implantation and continuing for the duration of the study. Group sizes of at least 10 animals are employed. Efficacy is determined by statistical comparison of tumor volume of nucleic acid-treated animals to a control group of animals treated with saline alone. Because the growth of these tumors is generally slow (45-60 days), an initial endpoint is the time in days it takes to establish an easily measurable primary tumor (i.e. 50-100 mm³) in the presence or absence of nucleic acid treatment.

[0194] EGFR Protein Levels for Patient Screening and as a Potential Endpoint

[0195] Because elevated EGFR levels can be detected in several cancers, cancer patients can be pre-screened for elevated EGFR prior to admission to initial clinical trials testing an anti-EGFR nucleic acid. Initial EGFR levels can be determined (by ELISA) from tumor biopsies or resected tumor samples. During clinical trials, it may be possible to monitor circulating EGFR protein by ELISA. Evaluation of serial blood/serum samples over the course of the anti-EGFR nucleic acid treatment period could be useful in determining early indications of efficacy.

### Example 7

### Activity of Nucleic Acid Molecules used to Down-Regulate EGFR Gene Expression

[0196] Applicant has designed, synthesized and tested several nucleic acid molecules targeted against EGFR RNA in cell proliferation and RNA reduction assays described herein.

[0197] Proliferation Assay

[0198] The model proliferation assay used in the study requires a cell-plating density of 2,000-10,000 cells/well in 96-well plates and at least 2 cell doublings over a 5-day treatment period. Cells used in proliferation studies were either lung or ovarian cancer cells (A549 and SKOV-3 cells respectively). To calculate cell density for proliferation assays, the FIPS (fluoro-imaging processing system) method known in the art was used. This method allows for cell density measurements after nucleic acids are stained with CyQuant® dye, and has the advantage of accurately measuring cell densities over a very wide range 1,000-100,000 cells/well in 96-well format.

[0199] Enzymatic nucleic acid molecules and GeneBlocs (50-200 nM) were delivered in the presence of cationic lipid at 2.5-5.0 μg/mL and inhibition of proliferation was determined on day 5 post-treatment. FIGS. 6 and 7 provide examples of anti-EGFR proliferation screens in A549 cells and SKOV3 cells respectively compared to untreated controls. Additional controls used in the screens include a SAC control (RPI 21083), a transfection control (Tf Control, lipid without nucleic acid), and GeneBloc control (RPI 11698). Table IX shows a comparison of different nucleic acid molecules of the invention in proliferation screens. This data shows that nucleic acid molecules of the invention are capable of down-regulating EGFR gene expression in mammalian cells. Enzymatic nucleic acid RPI 21256 can be used to target both EGFR and HER2 gene expression.

[0200] RNA Assay

[0201] RNA was harvested 24 hours post-treatment using the Qiagen RNeasyg 96 procedure.

[0202] Real time RT-PCR (TaqMan® assay) was performed on purified RNA samples using separate primer/probe sets specific for target EGFR RNA. FIGS. 8 and 9 show results of RNA screens in A549 and SKOV3 cells respectively compared to untreated controls. Additional controls used in the screens include a SAC control (RPI 21083), a transfection control (Tf Control, lipid without nucleic acid), and GeneBloc control (RPI 11698).

### Example 8

### Activity of Nucleic Acid Molecules used to Down-Regulate EGFR and HER2 Gene Expression

[0203] Applicant has designed, synthesized and tested nucleic acid molecules that target both EGFR and HER2 RNA in cell proliferation and RNA reduction assays described herein. The use a single nucleic acid molecule that can target both EGFR and HER2 RNA in a sequence specific manner can be advantageous in inhibiting the expression of two proteins that are up-regulated in a variety of cancers. Furthermore, Brandt et al., 1999, FASEB. J., 13, 1939-1949, propose that HER2 and EGFR are dominant heterodimer partners that determine a motogenic phonotype in human breast cancer cells. The use of nucleic acid molecules that target both EGFR and HER2 RNA is advantageous since only one composition is used to inhibit both targets and can potentially provide a synergistic or additive therapeutic effect. As shown in FIGS. 6 and 7, RPI 21256, an enzymatic nucleic acid that targets both HER2 and EGFR, provides significant antiproliferative activity in both A549 and SKOV3 cells.

[0204] Indications

[0205] Particular degenerative and disease states that can be associated with EGFR expression modulation include but are not limited to cancers and cancerous conditions such as breast, lung, prostate, colorectal, brain, esophageal, stomach, bladder, pancreatic, cervical, head and neck, and ovarian cancer, melanoma, lymphoma, glioma, multidrug resistant cancers, and any other diseases or conditions that are related to or will respond to the levels of EGFR in a cell or tissue, alone or in combination with other therapies.

[0206] The present body of knowledge in EGFR research indicates the need for methods to assay EGFR activity and for compounds that can regulate EGFR expression for research, diagnostic, and therapeutic use.

[0207] The use of monoclonal antibodies (eg; mAb IMC C225, mAB ABX-EGF) treatment, EGFR-specific tyrosine kinase inhibitors (TKIs), for example OSI-774 and ZDI839, chemotherapy, and/or radiation therapy, are all non-limiting examples of a methods that can be combined with or used in conjunction with the nucleic acid molecules (e.g. ribozymes and antisense molecules) of the instant invention. Common chemotherapies that can be combined with nucleic acid molecules of the instant invention include various combinations of cytotoxic drugs to kill the cancer cells. These drugs include but are not limited to paclitaxel (Taxol), docetaxel, cisplatin, methotrexate, cyclophosphamide, doxorubin, fluorouracil carboplatin, edatrexate, gemcitabine, vinorelbine etc. Those skilled in the art will recognize that other drug compounds and therapies can be similarly be readily combined with the nucleic acid molecules of the instant invention (e.g. ribozymes and antisense molecules) are hence within the scope of the instant invention.

[0208] Diagnostic Uses

[0209] The nucleic acid molecules of this invention (e.g., enzymatic nucleic acid molecules) can be used as diagnostic tools to examine genetic drift and mutations within diseased cells or to detect the presence of EGFR RNA in a cell. The close relationship between enzymatic nucleic acid molecule activity and the structure of the target RNA allows the detection of mutations in any region of the molecule which alters the base-pairing and three-dimensional structure of the target RNA. By using multiple enzymatic nucleic acid molecules described in this invention, one can map nucleotide changes which are important to RNA structure and function in vitro, as well as in cells and tissues. Cleavage of target RNAs with enzymatic nucleic acid molecules can be used to inhibit gene expression and define the role (essentially) of specified gene products in the progression of disease. In this manner, other genetic targets can be defined as important mediators of the disease. These experiments can lead to better treatment of the disease progression by affording the possibility of combinational therapies (e.g., multiple enzymatic nucleic acid molecules targeted to different genes, enzymatic nucleic acid molecules coupled with known small molecule inhibitors, or intermittent treatment with combinations of enzymatic nucleic acid molecules and/or other chemical or biological molecules). Other in vitro uses of enzymatic nucleic acid molecules of this invention are well known in the art, and include detection of the presence of mRNAs associated with EGFR-related condition. Such RNA is detected by determining the presence of a cleavage product after treatment with an enzymatic nucleic acid molecule using standard methodology.

[0210] In a specific example, enzymatic nucleic acid molecules which cleave only wild-type or mutant forms of the target RNA are used for the assay. The first enzymatic nucleic acid molecule is used to identify wild-type RNA present in the sample and the second enzymatic nucleic acid molecule is used to identify mutant RNA in the sample. As reaction controls, synthetic substrates of both wild-type and mutant RNA are cleaved by both enzymatic nucleic acid molecules to demonstrate the relative enzymatic nucleic acid molecule efficiencies in the reactions and the absence of cleavage of the “non-targeted” RNA species. The cleavage products from the synthetic substrates also serve to generate size markers for the analysis of wild-type and mutant RNAs in the sample population. Thus each analysis requires two enzymatic nucleic acid molecules, two substrates and one unknown sample which is combined into six reactions. The presence of cleavage products is determined using an RNAse protection assay so that full-length and cleavage fragments of each RNA can be analyzed in one lane of a polyacrylamide gel. It is not absolutely required to quantify the results to gain insight into the expression of mutant RNAs and putative risk of the desired phenotypic changes in target cells. The expression of mRNA whose protein product is implicated in the development of the phenotype (i.e., EGFR) is adequate to establish risk. If probes of comparable specific activity are used for both transcripts, then a qualitative comparison of RNA levels will be adequate and will decrease the cost of the initial diagnosis. Higher mutant form to wild-type ratios are correlated with higher risk whether RNA levels are compared qualitatively or quantitatively. The use of enzymatic nucleic acid molecules in diagnostic applications contemplated by the instant invention is more fully described in George et al., U.S. Pat. Nos. 5,834,186 and 5,741,679, Shih et al., U.S. Pat. No. 5,589,332, Nathan et al., U.S. Pat. No 5,871,914, Nathan and Ellington, International PCT publication No. WO 00/24931, Breaker et al., International PCT Publication Nos. WO 00/26226 and 98/27104, and Sullenger et al., International PCT publication No. WO 99/29842.

[0211] Additional Uses

[0212] Potential uses of sequence-specific enzymatic nucleic acid molecules of the instant invention can have many of the same applications for the study of RNA that DNA restriction endonucleases have for the study of DNA (Nathans et al., 1975 Ann. Rev. Biochem. 44:273). For example, the pattern of restriction fragments can be used to establish sequence relationships between two related RNAs, and large RNAs can be specifically cleaved to fragments of a size more useful for study. The ability to engineer sequence specificity of the enzymatic nucleic acid molecule is ideal for cleavage of RNAs of unknown sequence. Applicant has described the use of nucleic acid molecules to down-regulate gene expression of target genes in bacterial, microbial, fungal, viral, and eukaryotic systems including plant, or mammalian cells.

[0213] All patents and publications mentioned in the specification are indicative of the levels of skill of those skilled in the art to which the invention pertains. All references cited in this disclosure are incorporated by reference to the same extent as if each reference had been incorporated by reference in its entirety individually.

[0214] One skilled in the art would readily appreciate that the present invention is well adapted to carry out the objects and obtain the ends and advantages mentioned, as well as those inherent therein. The methods and compositions described herein as presently representative of preferred embodiments are exemplary and are not intended as limitations on the scope of the invention. Changes therein and other uses will occur to those skilled in the art, which are encompassed within the spirit of the invention, are defined by the scope of the claims.

[0215] It will be readily apparent to one skilled in the art that varying substitutions and modifications can be made to the invention disclosed herein without departing from the scope and spirit of the invention. Thus, such additional embodiments are within the scope of the present invention and the following claims.

[0216] The invention illustratively described herein suitably can be practiced in the absence of any element or elements, limitation or limitations which is not specifically disclosed herein. Thus, for example, in each instance herein any of the terms “comprising”, “consisting essentially of” and “consisting of” may be replaced with either of the other two terms. The terms and expressions which have been employed are used as terms of description and not of limitation, and there is no intention that in the use of such terms and expressions of excluding any equivalents of the features shown and described or portions thereof, but it is recognized that various modifications are possible within the scope of the invention claimed. Thus, it should be understood that although the present invention has been specifically disclosed by preferred embodiments, optional features, modification and variation of the concepts herein disclosed may be resorted to by those skilled in the art, and that such modifications and variations are considered to be within the scope of this invention as defined by the description and the appended claims.

[0217] In addition, where features or aspects of the invention are described in terms of Markush groups or other grouping of alternatives, those skilled in the art will recognize that the invention is also thereby described in terms of any individual member or subgroup of members of the Markush group or other group.

[0218] Other embodiments are within the claims that follow.

TABLE I
Characteristics of naturally occurring ribozymes

Group I Introns
Size: ˜150 to >1000 nucleotides.
Requires a U in the target sequence immediately 5′ of the cleavage site.
Binds 4-6 nucleotides at the 5′-side of the cleavage site.
Reaction mechanism: attack by the 3′-OH of guanosine to generate
cleavage products with 3′-OH and 5′-guanosine.
Additional protein cofactors required in some cases to help folding and
maintenance of the active structure.
Over 300 known members of this class. Found as an intervening sequence
in Tetrahymena thermophila rRNA, fungal mitochondria, chloroplasts,
phage T4, blue-green algae, and others.
Major structural features largely established through phylogenetic
comparisons, mutagenesis, and biochemical studies [ⁱ,ⁱⁱ].
Complete kinetic framework established for one ribozyme [ⁱⁱⁱ,^{iv},^{v},^{vi}].
Studies of ribozyme folding and substrate docking underway [^{vii},^{viii},^{ix}].
Chemical modification investigation of important residues well established
[^{x},^{xi}].
The small (4-6 nt) binding site may make this ribozyme too non-specific
for targeted RNA cleavage, however, the Tetrahymena group I intron has
been used to repair a “defective” β-galactosidase message by the ligation
of new β-galactosidase sequences onto the defective message [^{xii}].
RNAse P RNA (M1 RNA)
Size: ˜290 to 400 nucleotides.
RNA portion of a ubiquitous ribonucleoprotein enzyme.
Cleaves tRNA precursors to form mature tRNA [^{xiii}].
Reaction mechanism: possible attack by M²⁺-OH to generate cleavage
products with 3′-OH and 5′-phosphate.
RNAse P is found throughout the prokaryotes and eukaryotes. The RNA
subunit has been sequenced from bacteria, yeast, rodents, and primates.
Recruitment of endogenous RNAse P for therapeutic applications is
possible through hybridization of an External Guide Sequence (EGS) to
the target RNA [^{xiv},^{xv}]
Important phosphate and 2′ OH contacts recently identified [^{xvi},^{xvii}]
Group II Introns
Size: >1000 nucleotides.
Trans cleavage of target RNAs recently demonstrated [^{xviii},^{xix}].
Sequence requirements not fully determined.
Reaction mechanism: 2′-OH of an internal adenosine generates cleavage
products with 3′-OH and a “lariat” RNA containing a 3′-5′ and a 2′-5′
branch point.
Only natural ribozyme with demonstrated participation in DNA cleavage
[^{xx},^{xxi}] in addition to RNA cleavage and ligation.
Major structural features largely established through phylogenetic
comparisons [^{xxii}]
Important 2′ OH contacts beginning to be identified [^{xxiii}]
Kinetic framework under development [^{xxiv}]
Neurospora VS RNA
Size: ˜144 nucleotides.
Trans cleavage of hairpin target RNAs recently demonstrated [^{xxv}].
Sequence requirements not fully determined.
Reaction mechanism: attack by 2′-OH 5′ to the scissile bond to generate
cleavage products with 2′,3′-cyclic phosphate and 5′-OH ends.
Binding sites and structural requirements not fully determined.
Only 1 known member of this class. Found in Neurospora VS RNA.
Hammerhead Ribozyme
(see text for references)
Size: ˜13 to 40 nucleotides.
Requires the target sequence UH immediately 5′ of the cleavage site.
Binds a variable number nucleotides on both sides of the cleavage site.
Reaction mechanism: attack by 2′-OH 5′ to the scissile bond to generate
cleavage products with 2′,3′-cyclic phosphate and 5′-OH ends.
14 known members of this class. Found in a number of plant pathogens
(virusoids) that use RNA as the infectious agent.
Essential structural features largely defined, including 2 crystal structures
[^{xxvi},^{xxvii}]
Minimal ligation activity demonstrated (for engineering through in vitro
selection) [^{xxviii}]
Complete kinetic framework established for two or more ribozymes [^{xxix}].
Chemical modification investigation of important residues well established
[^{xxx}].
Hairpin Ribozyme
Size: ˜50 nucleotides.
Requires the target sequence GUC immediately 3′ of the cleavage site.
Binds 4-6 nucleotides at the 5′-side of the cleavage site and a variable
number to the 3′-side of the cleavage site.
Reaction mechanism: attack by 2′-OH 5′ to the scissile bond to generate
cleavage products with 2′,3′-cyclic phosphate and 5′-OH ends.
3 known members of this class. Found in three plant pathogen (satellite
RNAs of the tobacco ringspot virus, arabis mosaic virus and chicory
yellow mottle virus) which uses RNA as the infectious agent.
Essential structural features largely defined [^{xxxi},^{xxxii},^{xxxiii},^{xxxiv}]
Ligation activity (in addition to cleavage activity) makes ribozyme
amenable to engineering through in vitro selection [^{xxxv}]
Complete kinetic framework established for one ribozyme [^{xxxvi}].
Chemical modification investigation of important residues begun
[^{xxxvii},^{xxxviii}].
Hepatitis Delta Virus (HDV) Ribozyme
Size: ˜60 nucleotides.
Trans cleavage of target RNAs demonstrated [^{xxxix}].
Binding sites and structural requirements not fully determined, although no
sequences 5′ of cleavage site are required. Folded ribozyme contains a
pseudoknot structure [^{xl}]
Reaction mechanism: attack by 2′-OH 5′ to the scissile bond to generate
cleavage products with 2′,3′-cyclic phosphate and 5′-OH ends.
Only 2 known members of this class. Found in human HDV.
Circular form of HDV is active and shows increased nuclease stability [^{xli}]
ⁱ Michel, Francois; Westhof, Eric. Slippery substrates. Nat. Struct. Biol. (1994), 1(1), 5-7.
ⁱⁱ Lisacek, Frederique; Diaz, Yolande; Michel, Francois. Automatic identification of group I intron cores in genomic DNA sequences. J. Mol. Biol. (1994), 235(4), 1206-17.
ⁱⁱⁱ Herschlag, Daniel; Cech, Thomas R.. Catalysis of RNA cleavage by the Tetrahymena thermophila ribozyme. 1. Kinetic description of the reaction of an RNA substrate complementary to the active site. Biochemistry (1990), 29(44), 10159-71.
^{iv} Herschlag, Daniel; Cech, Thomas R.. Catalysis of RNA cleavage by the Tetrahymena thermophila ribozyme. 2. Kinetic description of the reaction of an RNA substrate that forms a mismatch at the active site. Biochemistry (1990), 29(44), 10172-80.
^{v} Knitt, Deborah S.; Herschlag, Daniel. pH Dependencies of the Tetrahymena Ribozyme Reveal an Unconventional Origin of an Apparent pKa. Biochemistry (1996), 35(5), 1560-70.
^{vi} Bevilacqua, Philip C.; Sugimoto, Naoki; Turner, Douglas H.. A mechanistic framework for the second step of splicing catalyzed by the Tetrahymena ribozyme. Biochemistry (1996), 35(2), 648-58.
^{vii} Li, Yi; Bevilacqua, Philip C.; Mathews, David; Turner, Douglas H.. Thermodynamic and activation parameters for binding of a pyrene-labeled substrate by the Tetrahymena ribozyme: docking is not diffusion-controlled and is driven by a favorable entropy change. Biochemistry (1995), 34(44), 14394-9.
^{viii} Banerjee, Aloke Raj; Turner, Douglas H.. The time dependence of chemical modification reveals slow steps in the folding of a group I ribozyme. Biochemistry (1995), 34(19), 6504-12.
^{ix} Zarrinkar, Patrick P.; Williamson, James R.. The P9.1-P9.2 peripheral extension helps guide folding of the Tetrahymena ribozyme. Nucleic Acids Res. (1996), 24(5), 854-8.
^{x} Strobel, Scott A.; Cech, Thomas R.. Minor groove recognition of the conserved G.cntdot.U pair at the Tetrahymena ribozyme reaction site. Science (Washington, D.C.) (1995), 267(5198), 675-9.
^{xi} Strobel, Scott A.; Cech, Thomas R.. Exocyclic Amine of the Conserved G.cntdot.U Pair at the Cleavage Site of the Tetrahymena Ribozyme Contributes to 5′-Splice Site Selection and Transition State Stabilization. Biochemistry (1996), 35(4), 1201-11.
^{xii} Sullenger, Bruce A.; Cech, Thomas R.. Ribozyme-mediated repair of defective mRNA by targeted trans-splicing. Nature (London) (1994), 371(6498), 619-22.
^{xiii} Robertson, H.D.; Altman, S.; Smith,J.D. J. Biol. Chem., 247, 5243-5251 (1972).
^{xiv} Forster, Anthony C.; Altman, Sidney. External guide sequences for an RNA enzyme. Science (Washington, D.C., 1883-) (1990), 249(4970), 783-6.
^{xv} Yuan, Y.; Hwang, E.S.; Altman, S. Targeted cleavage of mRNA by human RNase P. Proc. Natl. Acad. Sci. USA (1992) 89, 8006-10.
^{xvi} Harris, Michael E.; Pace, Norman R.. Identification of phosphates involved in catalysis by the ribozyme RNase P RNA. RNA (1995), 1(2), 210-18.
^{xvii} Pan, Tao; Loria, Andrew; Zhong, Kun. Probing of tertiary interactions in RNA: 2′-hydroxyl-base contacts between the RNase P RNA and pre-tRNA. Proc. Natl. Acad. Sci. U.S.A. (1995), 92(26), 12510-14.
^{xviii} Pyle, Anna Marie; Green, Justin B.. Building a Kinetic Framework for Group II Intron Ribozyme Activity: Quantitation of Interdomain Binding and Reaction Rate. Biochemistry (1994), 33(9), 2716-25.
^{xix} Michels, William J. Jr.; Pyle, Anna Marie. Conversion of a Group II Intron into a New Multiple-Turnover Ribozyme that Selectively Cleaves Oligonucleotides: Elucidation of Reaction Mechanism and Structure/Function Relationships. Biochemistry (1995), 34(9), 2965-77.
^{xx} Zimmerly, Steven; Guo, Huatao; Eskes, Robert; Yang, Jian; Perlman, Philip S.; Lambowitz, Alan M.. A group II intron RNA is a catalytic component of a DNA endonuclease involved in intron mobility. Cell (Cambridge, Mass.) (1995), 83(4), 529-38.
^{xxi} Griffin, Edmund A., Jr.; Qin, Zhifeng; Michels, Williams J., Jr.; Pyle, Anna Marie. Group II intron ribozymes that cleave DNA and RNA linkages with similar efficiency, and lack contacts with substrate 2′-hydroxyl groups. Chem. Biol. (1995), 2(11), 761-70.
^{xxii} Michel, Francois; Ferat, Jean Luc. Structure and activities of group II introns. Annu. Rev. Biochem. (1995), 64, 435-61.
^{xxiii} Abramovitz, Dana L.; Friedman, Richard A.; Pyle, Anna Marie. Catalytic role of 2′-hydroxyl groups within a group II intron active site. Science (Washington, D.C.) (1996), 271(5254), 1410-13.
^{xxiv} Daniels, Danette L.; Michels, William J., Jr.; Pyle, Anna Marie. Two competing pathways for self-splicing by group II introns: a quantitative analysis of in vitro reaction rates and products. J. Mol. Biol. (1996), 256(1), 31-49.
^{xxv} Guo, Hans C.T.; Collins, Richard A.. Efficient trans-cleavage of a stem-loop RNA substrate by a ribozyme derived from Neurospora VS RNA. EMBO J. (1995), 14(2), 368-76.
^{xxvi} Scott, W.G., Finch, J.T., Aaron,K. The crystal structure of an all RNA hammerhead ribozyme:Aproposed mechanism for RNA catalytic cleavage. Cell, (1995), 81, 991-1002.
^{xxvii} McKay, Structure and function of the hammerhead ribozyme: an unfinished story. RNA, (1996), 2, 395-403.
^{xxviii} Long, D., Uhlenbeck, 0., Hertel, K. Ligation with hammerhead ribozymes. U.S. Pat. No. 5,633,133.
^{xxix} Hertel, K.J., Herschlag, D., Uhlenbeck, O. A kinetic and thermodynamic framework for the hammerhead ribozyme reaction. Biochemistry, (1994) 33, 3374-3385.Beigelman, L., et al., Chemical modifications of hammerhead ribozymes. J. Biol. Chem., (1995) 270, 25702-25708.
^{xxx} Beigelman, L., et al., Chemical modifications of hammerhead ribozymes. J. Biol. Chem., (1995) 270, 25702-25708.
^{xxxi} Hampel, Arnold; Tritz, Richard; Hicks, Margaret; Cruz, Phillip. ‘Hairpin’ catalytic RNA model: evidence for helixes and sequence requirement for substrate RNA. Nucleic Acids Res. (1990), 18(2), 299-304.
^{xxxii} Chowrira, Bharat M.; Berzal-Herranz, Alfredo; Burke, John M.. Novel guanosine requirement for catalysis by the hairpin ribozyme. Nature (London) (1991), 354(6351), 320-2.
^{xxxiii} Berzal-Herranz, Alfredo; Joseph, Simpson; Chowrira, Bharat M.; Butcher, Samuel E.; Burke, John M.. Essential nucleotide sequences and secondary structure elements of the hairpin ribozyme. EMBO J. (1993), 12(6), 2567-73.
^{xxxiv} Joseph, Simpson; Berzal-Herranz, Alfredo; Chowrira, Bharat M.; Butcher, Samuel E.. Substrate selection rules for the hairpin ribozyme determined by in vitro selection, mutation, and analysis of mismatched substrates. Genes Dev. (1993), 7(1), 130-8.
^{xxxv} Berzal-Herranz, Alfredo; Joseph, Simpson; Burke, John M.. In vitro selection of active hairpin ribozymes by sequential RNA-catalyzed cleavage and ligation reactions. Genes Dev. (1992), 6(1), 129-34.
^{xxxvi} Hegg, Lisa A.; Fedor, Martha J.. Kinetics and Thermodynamics of Intermolecular Catalysis by Hairpin Ribozymes. Biochemistry (1995), 34(48), 15813-28.
^{xxxvii} Grasby, Jane A.; Mersmann, Karin; Singh, Mohinder; Gait, Michael J.. Purine Functional Groups in Essential Residues of the Hairpin Ribozyme Required for Catalytic Cleavage of RNA. Biochemistry (1995), 34(12), 4068-76.
^{xxxviii} Schmidt, Sabine; Beigelman, Leonid; Karpeisky, Alexander; Usman, Nassim; Sorensen, Ulrik S.; Gait, Michael J.. Base and sugar requirements for RNA cleavage of essential nucleoside residues in internal loop B of the hairpin ribozyme: implications for secondary structure. Nucleic Acids Res. (1996), 24(4), 573-81.
^{xxxix} Perrotta, Anne T.; Been, Michael D.. Cleavage of oligoribonucleotides by a ribozyme derived from the hepatitis delta. virus RNA sequence. Biochemistry (1992), 31(1), 16-21.
^{xl} Perrotta, Anne T.; Been, Michael D.. A pseudoknot-like structure required for efficient self-cleavage of hepatitis delta virus RNA. Nature (London) (1991), 350(6317), 434-6.
^{xli} Puttaraju, M.; Perrotta, Anne T.; Been, Michael D.. A circular trans-acting hepatitis delta virus ribozyme. Nucleic Acids Res. (1993), 21(18), 4253-8.

[0219] TABLE II

| | | | | | |
|---|---|---|---|---|---|
| | | | | Wait Time* 2'- | Wait Time* |
| Reagent | Equivalents | Amount | Wait Time* DNA | O-methyl | RNA |

A. 2.5 μmol Synthesis Cycle ABI 394 Instrument

| | | | | | | |
|---|---|---|---|---|---|---|
| Phosphoramidites | 6.5 | 163 | μL | 45 sec | 2.5 min | 7.5 min |
| S-Ethyl Tetrazole | 23.8 | 238 | μL | 45 sec | 2.5 min | 7.5 min |
| Acetic Anhydride | 100 | 233 | μL | 5 sec | 5 sec | 5 sec |
| N-Methyl Imidazole | 186 | 233 | μL | 5 sec | 5 sec | 5 sec |
| TCA | 176 | 2.3 | mL | 21 sec | 21 sec | 21 sec |
| Iodine | 11.2 | 1.7 | mL | 45 sec | 45 sec | 45 sec |
| Beaucage | 12.9 | 645 | μL | 100 sec | 300 sec | 300 sec |
| Acetonitrile | NA | 6.67 | mL | NA | NA | NA |

B. 0.2 μmol Synthesis Cycle ABI 394 Instrument

| | | | | | | |
|---|---|---|---|---|---|---|
| Phosphoramidites | 15 | 31 | μL | 45 sec | 233 sec | 465 sec |
| S-Ethyl Tetrazole | 38.7 | 31 | μL | 45 sec | 233 min | 465 sec |
| Acetic Anhydride | 655 | 124 | μL | 5 sec | 5 sec | 5 sec |
| N-Methyl Imidazole | 1245 | 124 | μL | 5 sec | 5 sec | 5 sec |
| TCA | 700 | 732 | μL | 10 sec | 10 sec | 10 sec |
| Iodine | 20.6 | 244 | μL | 15 sec | 15 sec | 15 sec |
| Beaucage | 7.7 | 232 | μL | 100 sec | 300 sec | 300 sec |
| Acetonitrile | NA | 2.64 | mL | NA | NA | NA |

| | | | | | |
|---|---|---|---|---|---|
| | Equivalents | Amount | | | |
| | DNA/2'-O- | DNA/2'-O-methyl/ | Wait Time* | Wait Time* | Wait Time* |
| Reagent | methyl/Ribo | Ribo | DNA | 2'-O-methyl | Ribo |

C. 0.2 μmol Synthesis Cycle 96 well Instrument

| | | | | | |
|---|---|---|---|---|---|
| Phosphoramidites | 22/33/66 | 40/60/120 μL | 60 sec | 180 sec | 360 sec |
| S-Ethyl Tetrazole | 70/105/210 | 40/60/120 μL | 60 sec | 180 min | 360 sec |
| Acetic Anhydride | 265/265/265 | 50/50/50 μL | 10 sec | 10 sec | 10 sec |
| N-Methyl Imidazole | 502/502/502 | 50/50/50 μL | 10 sec | 10 sec | 10 sec |
| TCA | 238/475/475 | 250/500/500 μL | 15 sec | 15 sec | 15 sec |
| Iodine | 6.8/6.8/6.8 | 80/80/80 μL | 30 sec | 30 sec | 30 sec |
| Beaucage | 34/51/51 | 80/120/120 | 100 sec | 200 sec | 200 sec |
| Acetonitrile | NA | 1150/1150/1150 μL | NA | NA | NA |

*Wait time does not include contact time during delivery.

[0220] TABLE III

Human EGFR Receptor Hammerhead Rihozyme and Substrate
Sequence

| | | | | |
|---|---|---|---|---|
| Pos | Substrate | Seq ID | Ribozyme | Seq ID |

| | | | | |
|---|---|---|---|---|
| 19 | GCCGGAGU C CCGAGCUA | 1 | UAGCUCGG CUGAUGAGGCCGUUAGGCCGAA ACUCCGGC | 3778 |
| 27 | CCCGAGCU A GCCCCGGC | 2 | GCCGGGGC CUGAUGAGGCCGUUAGGCCGAA AGCUCGGG | 3779 |
| 70 | GGCCACCU C GUCGGCGU | 3 | ACGCCGAC CUGAUGAGGCCGUUAGGCCGAA AGGUGGCC | 3780 |
| 73 | CACCUCGU C GGCGUCCG | 4 | CGGACGCC CUGAUGAGGCCGUUAGGCCGAA ACGAGGUG | 3781 |
| 79 | GUCGGCGU C CGCCCGAG | 5 | CUCGGGCG CUGAUGAGGCCGUUAGGCCGAA ACGCCGAC | 3782 |
| 89 | GCCCGAGU C CCCGCCUC | 6 | GAGGCGGG CUGAUGAGGCCGUUAGGCCGAA ACUCGGGC | 3783 |
| 97 | CCCCGCCU C GCCGCCAA | 7 | UUGGCGGC CUGAUGAGGCCGUUAGGCCGAA AGGCGGGG | 3784 |
| 137 | CCCUGACU C CGUCCAGU | 8 | ACUGGACG CUGAUGAGGCCGUUAGGCCGAA AGUCAGGG | 3785 |
| 141 | GACUCCGU C CAGUAUUG | 9 | CAAUACUG CUGAUGAGGCCGUUAGGCCGAA ACGGAGUC | 3786 |
| 146 | CGUCCAGU A UUGAUCGG | 10 | CCGAUCAA CUGAUGAGGCCGUUAGGCCGAA ACUGGACG | 3787 |
| 148 | UCCAGUAU U GAUCGGGA | 11 | UCCCGAUC CUGAUGAGGCCGUUAGGCCGAA AUACUGGA | 3788 |
| 152 | GUAUUGAU C GGGAGAGC | 12 | GCUCUCCC CUGAUGAGGCCGUUAGGCCGAA AUCAAUAC | 3789 |
| 172 | AGCGAGCU C UUCGGGGA | 13 | UCCCCGAA CUGAUGAGGCCGUUAGGCCGAA AGCUCGCU | 3790 |
| 174 | CGAGCUCU U CGGGGAGC | 14 | GCUCCCCG CUGAUGAGGCCGUUAGGCCGAA AGAGCUCG | 3791 |
| 175 | GAGCUCUU C GGGGAGCA | 15 | UGCUCCCC CUGAUGAGGCCGUUAGGCCGAA AAGAGCUC | 3792 |
| 197 | GCGACCCU C CGGGACGG | 16 | CCGUCCCG CUGAUGAGGCCGUUAGGCCGAA AGGGUCGC | 3793 |
| 219 | GCAGCGCU C CUGGCGCU | 17 | AGCGCCAG CUGAUGAGGCCGUUAGGCCGAA AGCGCUGC | 3794 |
| 240 | GCUGCGCU C UGCCCGGC | 18 | GCCGGGCA CUGAUGAGGCCGUUAGGCCGAA AGCGCAGC | 3795 |
| 253 | CGGCGAGU C GGGCUCUG | 19 | CAGAGCCC CUGAUGAGGCCGUUAGGCCGAA ACUCGCCG | 3796 |
| 259 | GUCGGGCU C UGGAGGAA | 20 | UUCCUCCA CUGAUGAGGCCGUUAGGCCGAA AGCCCGAC | 3797 |
| 276 | AAGAAAGU U UGCCAAGG | 21 | CCUUGGCA CUGAUGAGGCCGUUAGGCCGAA ACUUUCUU | 3798 |
| 277 | AGAAAGUU U GCCAAGGC | 22 | GCCUUGGC CUGAUGAGGCCGUUAGGCCGAA AACUUUCU | 3799 |
| 292 | GCACGAGU A ACAAGCUC | 23 | GAGCUUGU CUGAUGAGGCCGUUAGGCCGAA ACUCGUGC | 3800 |
| 300 | AACAAGCU C ACGCAGUU | 24 | AACUGCGU CUGAUGAGGCCGUUAGGCCGAA AGCUUGUU | 3801 |
| 308 | CACGCAGU U GGGCACUU | 25 | AAGUGCCC CUGAUGAGGCCGUUAGGCCGAA ACUGCGUG | 3802 |
| 316 | UGGGCACU U UUGAAGAU | 26 | AUCUUCAA CUGAUGAGGCCGUUAGGCCGAA AGUGCCCA | 3803 |
| 317 | GGGCACUU U UGAAGAUC | 27 | GAUCUUCA CUGAUGAGGCCGUUAGGCCGAA AAGUGCCC | 3804 |
| 318 | GGCACUUU U GAAGAUCA | 28 | UGAUCUUC CUGAUGAGGCCGUUAGGCCGAA AAAGUGCC | 3805 |
| 325 | UUGAAGAU C AUUUUCUC | 29 | GAGAAAAU CUGAUGAGGCCGUUAGGCCGAA AUCUUCAA | 3806 |
| 328 | AAGAUCAU U UUCUCAGC | 30 | GCUGAGAA CUGAUGAGGCCGUUAGGCCGAA AUGAUCUU | 3807 |
| 329 | AGAUCAUU U UCUCAGCC | 31 | GGCUGAGA CUGAUGAGGCCGUUAGGCCGAA AAUGAUCU | 3808 |
| 330 | GAUCAUUU U CUCAGCCU | 32 | AGGCUGAG CUGAUGAGGCCGUUAGGCCGAA AAAUGAUC | 3809 |
| 331 | AUCAUUUU C UCAGCCUC | 33 | GAGGCUGA CUGAUGAGGCCGUUAGGCCGAA AAAAUGAU | 3810 |
| 333 | CAUUUUCU C AGCCUCCA | 34 | UGGAGGCU CUGAUGAGGCCGUUAGGCCGAA AGAAAAUG | 3811 |
| 339 | CUCAGCCU C CAGAGGAU | 35 | AUCCUCUG CUGAUGAGGCCGUUAGGCCGAA AGGCUGAG | 3812 |
| 350 | GAGGAUGU U CAAUAACU | 36 | AGUUAUUG CUGAUGAGGCCGUUAGGCCGAA ACAUCCUC | 3813 |
| 351 | AGGAUGUU C AAUAACUG | 37 | CAGUUAUU CUGAUGAGGCCGUUAGGCCGAA AACAUCCU | 3814 |
| 355 | UGUUCAAU A ACUGUGAG | 38 | CUCACAGU CUGAUGAGGCCGUUAGGCCGAA AUUGAACA | 3815 |
| 369 | GAGGUGGU C CUUGGGAA | 39 | UUCCCAAG CUGAUGAGGCCGUUAGGCCGAA ACCACCUC | 3816 |
| 372 | GUGGUCCU U GGGAAUUU | 40 | AAAUUCCC CUGAUGAGGCCGUUAGGCCGAA AGGACCAC | 3817 |
| 379 | UUGGGAAU U UGGAAAUU | 41 | AAUUUCCA CUGAUGAGGCCGUUAGGCCGAA AUUCCCAA | 3818 |
| 380 | UGGGAAUU U GGAAAUUA | 42 | UAAUUUCC CUGAUGAGGCCGUUAGGCCGAA AAUUCCCA | 3819 |
| 387 | UUGGAAAU U ACCUAUGU | 43 | ACAUAGGU CUGAUGAGGCCGUUAGGCCGAA AUUUCCAA | 3820 |
| 388 | UGGAAAUU A CCUAUGUG | 44 | CACAUAGG CUGAUGAGGCCGUUAGGCCGAA AAUUUCCA | 3821 |
| 392 | AAUUACCU A UGUGCAGA | 45 | UCUGCACA CUGAUGAGGCCGUUAGGCCGAA AGGUAAUU | 3822 |
| 406 | AGAGGAAU U AUGAUCUU | 46 | AAGAUCAU CUGAUGAGGCCGUUAGGCCGAA AUUCCUCU | 3823 |
| 407 | GAGGAAUU A UGAUCUUU | 47 | AAAGAUCA CUGAUGAGGCCGUUAGGCCGAA AAUUCCUC | 3824 |
| 412 | AUUAUGAU C UUUCCUUC | 48 | GAAGGAAA CUGAUGAGGCCGUUAGGCCGAA AUCAUAAU | 3825 |
| 414 | UAUGAUCU U UCCUUCUU | 49 | AAGAAGGA CUGAUGAGGCCGUUAGGCCGAA AGAUCAUA | 3826 |
| 415 | AUGAUCUU U CCUUCUUA | 50 | UAAGAAGG CUGAUGAGGCCGUUAGGCCGAA AAGAUCAU | 3827 |
| 416 | UGAUCUUU C CUUCUUAA | 51 | UUAAGAAG CUGAUGAGGCCGUUAGGCCGAA AAAGAUCA | 3828 |
| 419 | UCUUUCCU U CUUAAAGA | 52 | UCUUUAAG CUGAUGAGGCCGUUAGGCCGAA AGGAAAGA | 3829 |
| 420 | CUUUCCUU C UUAAAGAC | 53 | GUCUUUAA CUGAUGAGGCCGUUAGGCCGAA AAGGAAAG | 3830 |
| 422 | UUCCUUCU U AAAGACCA | 54 | UGGUCUUU CUGAUGAGGCCGUUAGGCCGAA AGAAGGAA | 3831 |
| 423 | UCCUUCUU A AAGACCAU | 55 | AUGGUCUU CUGAUGAGGCCGUUAGGCCGAA AAGAAGGA | 3832 |
| 432 | AAGACCAU C CAGGAGGU | 56 | ACCUCCUG CUGAUGAGGCCGUUAGGCCGAA AUGGUCUU | 3833 |
| 448 | UGGCUGGU U AUGUCCUC | 57 | GAGGACAU CUGAUGAGGCCGUUAGGCCGAA ACCAGCCA | 3834 |
| 449 | GGCUGGUU A UGUCCUCA | 58 | UGAGGACA CUGAUGAGGCCGUUAGGCCGAA AACCAGCC | 3835 |
| 453 | GGUUAUGU C CUCAUUGC | 59 | GCAAUGAG CUGAUGAGGCCGUUAGGCCGAA ACAUAACC | 3836 |
| 456 | UAUGUCCU C AUUGCCCU | 60 | AGGGCAAU CUGAUGAGGCCGUUAGGCCGAA AGGACAUA | 3837 |
| 459 | GUCCUCAU U GCCCUCAA | 61 | UUGAGGGC CUGAUGAGGCCGUUAGGCCGAA AUGAGGAC | 3838 |
| 465 | AUUGCCCU C AACACAGU | 62 | ACUGUGUU CUGAUGAGGCCGUUAGGCCGAA AGGGCAAU | 3839 |
| 483 | GAGCGAAU U CCUUUGGA | 63 | UCCAAAGG CUGAUGAGGCCGUUAGGCCGAA AUUCGCUC | 3840 |
| 484 | AGCGAAUU C CUUUGGAA | 64 | UUCCAAAG CUGAUGAGGCCGUUAGGCCGAA AAUUCGCU | 3841 |
| 487 | GAAUUCCU U UGGAAAAC | 65 | GUUUUCCA CUGAUGAGGCCGUUAGGCCGAA AGGAAUUC | 3842 |
| 488 | AAUUCCUU U GGAAAACC | 66 | GGUUUUCC CUGAUGAGGCCGUUAGGCCGAA AAGGAAUU | 3843 |
| 504 | CUGCAGAU C AUCAGAGG | 67 | CCUCUGAU CUGAUGAGGCCGUUAGGCCGAA AUCUGCAG | 3844 |
| 507 | CAGAUCAU C AGAGGAAA | 68 | UUUCCUCU CUGAUGAGGCCGUUAGGCCGAA AUGAUCUG | 3845 |
| 517 | GAGGAAAU A UGUACUAC | 69 | GUAGUACA CUGAUGAGGCCGUUAGGCCGAA AUUUCCUC | 3846 |
| 521 | AAAUAUGU A CUACGAAA | 70 | UUUCGUAG CUGAUGAGGCCGUUAGGCCGAA ACAUAUUU | 3847 |
| 524 | UAUGUACU A CGAAAAUU | 71 | AAUUUUCG CUGAUGAGGCCGUUAGGCCGAA AGUACAUA | 3848 |
| 532 | ACGAAAAU U CCUAUGCC | 72 | GGCAUAGG CUGAUGAGGCCGUUAGGCCGAA AUUUUCGU | 3849 |
| 533 | CGAAAAUU C CUAUGCCU | 73 | AGGCAUAG CUGAUGAGGCCGUUAGGCCGAA AAUUUUCG | 3850 |
| 536 | AAAUUCCU A UGCCUUAG | 74 | CUAAGGCA CUGAUGAGGCCGUUAGGCCGAA AGGAAUUU | 3851 |
| 542 | CUAUGCCU U AGCAGUCU | 75 | AGACUGCU CUGAUGAGGCCGUUAGGCCGAA AGGCAUAG | 3852 |
| 543 | UAUGCCUU A GCAGUCUU | 76 | AAGACUGC CUGAUGAGGCCGUUAGGCCGAA AAGGCAUA | 3853 |
| 549 | UUAGCAGU C UUAUCUAA | 77 | UUAGAUAA CUGAUGAGGCCGUUAGGCCGAA ACUGCUAA | 3854 |
| 551 | AGCAGUCU U AUCUAACU | 78 | AGUUAGAU CUGAUGAGGCCGUUAGGCCGAA AGACUGCU | 3855 |
| 552 | GCAGUCUU A UCUAACUA | 79 | UAGUUAGA CUGAUGAGGCCGUUAGGCCGAA AAGACUGC | 3856 |
| 554 | AGUCUUAU C UAACUAUG | 80 | CAUAGUUA CUGAUGAGGCCGUUAGGCCGAA AUAAGACU | 3857 |
| 556 | UCUUAUCU A ACUAUGAU | 81 | AUCAUAGU CUGAUGAGGCCGUUAGGCCGAA AGAUAAGA | 3858 |
| 560 | AUCUAACU A UGAUGCAA | 82 | UUGCAUCA CUGAUGAGGCCGUUAGGCCGAA AGUUAGAU | 3859 |
| 571 | AUGCAAAU A AAACCGGA | 83 | UCCGGUUU CUGAUGAGGCCGUUAGGCCGAA AUUUGCAU | 3860 |
| 604 | UGAGAAAU U UACAGGAA | 84 | UUCCUGUA CUGAUGAGGCCGUUAGGCCGAA AUUUCUCA | 3861 |
| 605 | GAGAAAUU U ACAGGAAA | 85 | UUUCCUGU CUGAUGAGGCCGUUAGGCCGAA AAUUUCUC | 3862 |
| 606 | AGAAAUUU A CAGGAAAU | 86 | AUUUCCUG CUGAUGAGGCCGUUAGGCCGAA AAAUUUCU | 3863 |
| 615 | CAGGAAAU C CUGCAUGG | 87 | CCAUGCAG CUGAUGAGGCCGUUAGGCCGAA AUUUCCUG | 3864 |
| 635 | CGUGCGGU U CAGCAACA | 88 | UGUUGCUG CUGAUGAGGCCGUUAGGCCGAA ACCGCACG | 3865 |
| 636 | GUGCGGUU C AGCAACAA | 89 | UUGUUGCU CUGAUGAGGCCGUUAGGCCGAA AACCGCAC | 3866 |
| 672 | GAGAGCAU C CAGUGGCG | 90 | CGCCACUG CUGAUGAGGCCGUUAGGCCGAA AUGCUCUC | 3867 |
| 687 | CGGGACAU A GUCAGCAG | 91 | CUGCUGAC CUGAUGAGGCCGUUAGGCCGAA AUGUCCCG | 3868 |
| 690 | GACAUAGU C AGCAGUGA | 92 | UCACUGCU CUGAUGAGGCCGUUAGGCCGAA ACUAUGUC | 3869 |
| 701 | CAGUGACU U UCUCAGCA | 93 | UGCUGAGA CUGAUGAGGCCGUUAGGCCGAA AGUCACUG | 3870 |
| 702 | AGUGACUU U CUCAGCAA | 94 | UUGCUGAG CUGAUGAGGCCGUUAGGCCGAA AAGUCACU | 3871 |
| 703 | GUGACUUU C UCAGCAAC | 95 | GUUGCUGA CUGAUGAGGCCGUUAGGCCGAA AAAGUCAC | 3872 |
| 705 | GACUUUCU C AGCAACAU | 96 | AUGUUGCU CUGAUGAGGCCGUUAGGCCGAA AGAAAGUC | 3873 |
| 716 | CAACAUGU C GAUGGACU | 97 | AGUCCAUC CUGAUGAGGCCGUUAGGCCGAA ACAUGUUG | 3874 |
| 725 | GAUGGACU U CCAGAACC | 98 | GGUUCUGG CUGAUGAGGCCGUUAGGCCGAA AGUCCAUC | 3875 |
| 726 | AUGGACUU C CAGAACCA | 99 | UGGUUCUG CUGAUGAGGCCGUUAGGCCGAA AAGUCCAU | 3876 |
| 760 | AGUGUGAU C CAAGCUGU | 100 | ACAGCUUG CUGAUGAGGCCGUUAGGCCGAA AUCACACU | 3877 |
| 769 | CAAGCUGU C CCAAUGGG | 101 | CCCAUUGG CUGAUGAGGCCGUUAGGCCGAA ACAGCUUG | 3878 |
| 825 | ACCAAAAU C AUCUGUGC | 102 | GCACAGAU CUGAUGAGGCCGUUAGGCCGAA AUUUUGGU | 3879 |
| 828 | AAAAUCAU C UGUGCCCA | 103 | UGGGCACA CUGAUGAGGCCGUUAGGCCGAA AUGAUUUU | 3880 |
| 845 | GCAGUGCU C CGGGCGCU | 104 | AGCGCCCG CUGAUGAGGCCGUUAGGCCGAA AGCACUGC | 3881 |
| 866 | UGGCAAGU C CCCCAGUG | 105 | CACUGGGG CUGAUGAGGCCGUUAGGCCGAA ACUUGCCA | 3882 |
| 936 | UGCCUGGU C UGCCGCAA | 106 | UUGCGGCA CUGAUGAGGCCGUUAGGCCGAA ACCAGGCA | 3883 |
| 947 | CCGCAAAU U CCGAGACG | 107 | CGUCUCGG CUGAUGAGGCCGUUAGGCCGAA AUUUGCGG | 3884 |
| 948 | CGCAAAUU C CGAGACGA | 108 | UCGUCUCG CUGAUGAGGCCGUUAGGCCGAA AAUUUGCG | 3885 |
| 987 | CCCCCACU C AUGCUCUA | 109 | UAGAGCAU CUGAUGAGGCCGUUAGGCCGAA AGUGGGGG | 3886 |
| 993 | CUCAUGCU C UACAACCC | 110 | GGGUUGUA CUGAUGAGGCCGUUAGGCCGAA AGCAUGAG | 3887 |
| 995 | CAUGCUCU A CAACCCCA | 111 | UGGGGUUG CUGAUGAGGCCGUUAGGCCGAA AGAGCAUG | 3888 |
| 1010 | CACCACGU A CCAGAUGG | 112 | CCAUCUGG CUGAUGAGGCCGUUAGGCCGAA ACGUGGUG | 3889 |
| 1040 | GGGCAAAU A CAGCUUUG | 113 | CAAAGCUG CUGAUGAGGCCGUUAGGCCGAA AUUUGCCC | 3890 |
| 1046 | AUACAGCU U UGGUGCCA | 114 | UGGCACCA CUGAUGAGGCCGUUAGGCCGAA AGCUGUAU | 3891 |
| 1047 | UACAGCUU U GGUGCCAC | 115 | GUGGCACC CUGAUGAGGCCGUUAGGCCGAA AAGCUGUA | 3892 |
| 1072 | AGAAGUGU C CCCGUAAU | 116 | AUUACGGG CUGAUGAGGCCGUUAGGCCGAA ACACUUCU | 3893 |
| 1078 | GUCCCCGU A AUUAUGUG | 117 | CACAUAAU CUGAUGAGGCCGUUAGGCCGAA ACGGGGAC | 3894 |
| 1081 | CCCGUAAU U AUGUGGUG | 118 | CACCACAU CUGAUGAGGCCGUUAGGCCGAA AUUACGGG | 3895 |
| 1082 | CCGUAAUU A UGUGGUGA | 119 | UCACCACA CUGAUGAGGCCGUUAGGCCGAA AAUUACGG | 3896 |
| 1096 | UGACAGAU C ACGGCUCG | 120 | CGAGCCGU CUGAUGAGGCCGUUAGGCCGAA AUCUGUCA | 3897 |
| 1103 | UCACGGCU C GUGCGUCC | 121 | GGACGCAC CUGAUGAGGCCGUUAGGCCGAA AGCCGUGA | 3898 |
| 1110 | UCGUGCGU C CGAGCCUG | 122 | CAGGCUCG CUGAUGAGGCCGUUAGGCCGAA ACGCACGA | 3899 |
| 1133 | CGACAGCU A UGAGAUGG | 123 | CCAUCUCA CUGAUGAGGCCGUUAGGCCGAA AGCUGUCG | 3900 |
| 1155 | GACGGCGU C CGCAAGUG | 124 | CACUUGCG CUGAUGAGGCCGUUAGGCCGAA ACGCCGUC | 3901 |
| 1165 | GCAAGUGU A AGAAGUGC | 125 | GCACUUCU CUGAUGAGGCCGUUAGGCCGAA ACACUUGC | 3902 |
| 1183 | AAGGGCCU U GCCGCAAA | 126 | UUUGCGGC CUGAUGAGGCCGUUAGGCCGAA AGGCCCUU | 3903 |
| 1198 | AAGUGUGU A ACGGAAUA | 127 | UAUUCCGU CUGAUGAGGCCGUUAGGCCGAA ACACACUU | 3904 |
| 1206 | AACGGAAU A GGUAUUGG | 128 | CCAAUACC CUGAUGAGGCCGUUAGGCCGAA AUUCCGUU | 3905 |
| 1210 | GAAUAGGU A UUGGUGAA | 129 | UUCACCAA CUGAUGAGGCCGUUAGGCCGAA ACCUAUUC | 3906 |
| 1212 | AUAGGUAU U GGUGAAUU | 130 | AAUUCACC CUGAUGAGGCCGUUAGGCCGAA AUACCUAU | 3907 |
| 1220 | UGGUGAAU U UAAAGACU | 131 | AGUCUUUA CUGAUGAGGCCGUUAGGCCGAA AUUCACCA | 3908 |
| 1221 | GGUGAAUU U AAAGACUC | 132 | GAGUCUUU CUGAUGAGGCCGUUAGGCCGAA AAUUCACC | 3909 |
| 1222 | GUGAAUUU A AAGACUCA | 133 | UGAGUCUU CUGAUGAGGCCGUUAGGCCGAA AAAUUCAC | 3910 |
| 1229 | UAAAGACU C ACUCUCCA | 134 | UGGAGAGU CUGAUGAGGCCGUUAGGCCGAA AGUCUUUA | 3911 |
| 1233 | GACUCACU C UCCAUAAA | 135 | UUUAUGGA CUGAUGAGGCCGUUAGGCCGAA AGUGAGUC | 3912 |
| 1235 | CUCACUCU C CAUAAAUG | 136 | CAUUUAUG CUGAUGAGGCCGUUAGGCCGAA AGAGUGAG | 3913 |
| 1239 | CUCUCCAU A AAUGCUAC | 137 | GUAGCAUU CUGAUGAGGCCGUUAGGCCGAA AUGGAGAG | 3914 |
| 1246 | UAAAUGCU A CGAAUAUU | 138 | AAUAUUCG CUGAUGAGGCCGUUAGGCCGAA AGCAUUUA | 3915 |
| 1252 | CUACGAAU A UUAAACAC | 139 | GUGUUUAA CUGAUGAGGCCGUUAGGCCGAA AUUCGUAG | 3916 |
| 1254 | ACGAAUAU U AAACACUU | 140 | AAGUGUUU CUGAUGAGGCCGUUAGGCCGAA AUAUUCGU | 3917 |
| 1255 | CGAAUAUU A AACACUUC | 141 | GAAGUGUU CUGAUGAGGCCGUUAGGCCGAA AAUAUUCG | 3918 |
| 1262 | UAAACACU U CAAAAACU | 142 | AGUUUUUG CUGAUGAGGCCGUUAGGCCGAA AGUGUUUA | 3919 |
| 1263 | AAACACUU C AAAAACUG | 143 | CAGUUUUU CUGAUGAGGCCGUUAGGCCGAA AAGUGUUU | 3920 |
| 1277 | CUGCACCU C CAUCAGUG | 144 | CACUGAUG CUGAUGAGGCCGUUAGGCCGAA AGGUGCAG | 3921 |
| 1281 | ACCUCCAU C AGUGGCGA | 145 | UCGCCACU CUGAUGAGGCCGUUAGGCCGAA AUGGAGGU | 3922 |
| 1291 | GUGGCGAU C UCCACAUC | 146 | GAUGUGGA CUGAUGAGGCCGUUAGGCCGAA AUCGCCAC | 3923 |
| 1293 | GGCGAUCU C CACAUCCU | 147 | AGGAUGUG CUGAUGAGGCCGUUAGGCCGAA AGAUCGCC | 3924 |
| 1299 | CUCCACAU C CUGCCGGU | 148 | ACCGGCAG CUGAUGAGGCCGUUAGGCCGAA AUGUGGAG | 3925 |
| 1313 | GGUGGCAU U UAGGGGUG | 149 | CACCCCUA CUGAUGAGGCCGUUAGGCCGAA AUGCCACC | 3926 |
| 1314 | GUGGCAUU U AGGGGUGA | 150 | UCACCCCU CUGAUGAGGCCGUUAGGCCGAA AAUGCCAC | 3927 |
| 1315 | UGGCAUUU A GGGGUGAC | 151 | GUCACCCC CUGAUGAGGCCGUUAGGCCGAA AAAUGCCA | 3928 |
| 1325 | GGGUGACU C CUUCACAC | 152 | GUGUGAAG CUGAUGAGGCCGUUAGGCCGAA AGUCACCC | 3929 |
| 1328 | UGACUCCU U CACACAUA | 153 | UAUGUGUG CUGAUGAGGCCGUUAGGCCGAA AGGAGUCA | 3930 |
| 1329 | GACUCCUU C ACACAUAC | 154 | GUAUGUGU CUGAUGAGGCCGUUAGGCCGAA AAGGAGUC | 3931 |
| 1336 | UCACACAU A CUCCUCCU | 155 | AGGAGGAG CUGAUGAGGCCGUUAGGCCGAA AUGUGUGA | 3932 |
| 1339 | CACAUACU C CUCCUCUG | 156 | CAGAGGAG CUGAUGAGGCCGUUAGGCCGAA AGUAUGUG | 3933 |
| 1342 | AUACUCCU C CUCUGGAU | 157 | AUCCAGAG CUGAUGAGGCCGUUAGGCCGAA AGGAGUAU | 3934 |
| 1345 | CUCCUCCU C UGGAUCCA | 158 | UGGAUCCA CUGAUGAGGCCGUUAGGCCGAA AGGAGGAG | 3935 |
| 1351 | CUCUGGAU C CACAGGAA | 159 | UUCCUGUG CUGAUGAGGCCGUUAGGCCGAA AUCCAGAG | 3936 |
| 1366 | AACUGGAU A UUCUGAAA | 160 | UUUCAGAA CUGAUGAGGCCGUUAGGCCGAA AUCCAGUU | 3937 |
| 1368 | CUGGAUAU U CUGAAAAC | 161 | GUUUUCAG CUGAUGAGGCCGUUAGGCCGAA AUAUCCAG | 3938 |
| 1369 | UGGAUAUU C UGAAAACC | 162 | GGUUUUCA CUGAUGAGGCCGUUAGGCCGAA AAUAUCCA | 3939 |
| 1380 | AAAACCGU A AAGGAAAU | 163 | AUUUCCUU CUGAUGAGGCCGUUAGGCCGAA ACGGUUUU | 3940 |
| 1389 | AAGGAAAU C ACAGGGUU | 164 | AACCCUGU CUGAUGAGGCCGUUAGGCCGAA AUUUCCUU | 3941 |
| 1397 | CACAGGGU U UUUGCUGA | 165 | UCAGCAAA CUGAUGAGGCCGUUAGGCCGAA ACCCUGUG | 3942 |
| 1398 | ACAGGGUU U UUGCUGAU | 166 | AUCAGCAA CUGAUGAGGCCGUUAGGCCGAA AACCCUGU | 3943 |
| 1399 | CAGGGUUU U UGCUGAUU | 167 | AAUCAGCA CUGAUGAGGCCGUUAGGCCGAA AAACCCUG | 3944 |
| 1400 | AGGGUUUU U GCUGAUUC | 168 | GAAUCAGC CUGAUGAGGCCGUUAGGCCGAA AAAACCCU | 3945 |
| 1407 | UUGCUGAU U CAGGCUUG | 169 | CAAGCCUG CUGAUGAGGCCGUUAGGCCGAA AUCAGCAA | 3946 |
| 1408 | UGCUGAUU C AGGCUUGG | 170 | CCAAGCCU CUGAUGAGGCCGUUAGGCCGAA AAUCAGCA | 3947 |
| 1414 | UUCAGGCU U GGCCUGAA | 171 | UUCAGGCC CUGAUGAGGCCGUUAGGCCGAA AGCCUGAA | 3948 |
| 1437 | ACGGACCU C CAUGCCUU | 172 | AAGGCAUG CUGAUGAGGCCGUUAGGCCGAA AGGUCCGU | 3949 |
| 1445 | CCAUGCCU U UGAGAACC | 173 | GGUUCUCA CUGAUGAGGCCGUUAGGCCGAA AGGCAUGG | 3950 |
| 1446 | CAUGCCUU U GAGAACCU | 174 | AGGUUCUC CUGAUGAGGCCGUUAGGCCGAA AAGGCAUG | 3951 |
| 1455 | GAGAACCU A GAAAUCAU | 175 | AUGAUUUC CUGAUGAGGCCGUUAGGCCGAA AGGUUCUC | 3952 |
| 1461 | CUAGAAAU C AUACGCGG | 176 | CCGCGUAU CUGAUGAGGCCGUUAGGCCGAA AUUUCUAG | 3953 |
| 1464 | GAAAUCAU A CGCGGCAG | 177 | CUGCCGCG CUGAUGAGGCCGUUAGGCCGAA AUGAUUUC | 3954 |
| 1489 | AACAUGGU C AGUUUUCU | 178 | AGAAAACU CUGAUGAGGCCGUUAGGCCGAA ACCAUGUU | 3955 |
| 1493 | UGGUCAGU U UUCUCUUG | 179 | CAAGAGAA CUGAUGAGGCCGUUAGGCCGAA ACUGACCA | 3956 |
| 1494 | GGUCAGUU U UCUCUUGC | 180 | GCAAGAGA CUGAUGAGGCCGUUAGGCCGAA AACUGACC | 3957 |
| 1495 | GUCAGUUU U CUCUUGCA | 181 | UGCAAGAG CUGAUGAGGCCGUUAGGCCGAA AAACUGAC | 3958 |
| 1496 | UCAGUUUU C UCUUGCAG | 182 | CUGCAAGA CUGAUGAGGCCGUUAGGCCGAA AAAACUGA | 3959 |
| 1498 | AGUUUUCU C UUGCAGUC | 183 | GACUGCAA CUGAUGAGGCCGUUAGGCCGAA AGAAAACU | 3960 |
| 1500 | UUUUCUCU U GCAGUCGU | 184 | ACGACUGC CUGAUGAGGCCGUUAGGCCGAA AGAGAAAA | 3961 |
| 1506 | CUUGCAGU C GUCAGCCU | 185 | AGGCUGAC CUGAUGAGGCCGUUAGGCCGAA ACUGCAAG | 3962 |
| 1509 | GCAGUCGU C AGCCUGAA | 186 | UUCAGGCU CUGAUGAGGCCGUUAGGCCGAA ACGACUGC | 3963 |
| 1521 | CUGAACAU A ACAUCCUU | 187 | AAGGAUGU CUGAUGAGGCCGUUAGGCCGAA AUGUUCAG | 3964 |
| 1526 | CAUAACAU C CUUGGGAU | 188 | AUCCCAAG CUGAUGAGGCCGUUAGGCCGAA AUGUUAUG | 3965 |
| 1529 | AACAUCCU U GGGAUUAC | 189 | GUAAUCCC CUGAUGAGGCCGUUAGGCCGAA AGGAUGUU | 3966 |
| 1535 | CUUGGGAU U ACGCUCCC | 190 | GGGAGCGU CUGAUGAGGCCGUUAGGCCGAA AUCCCAAG | 3967 |
| 1536 | UUGGGAUU A CGCUCCCU | 191 | AGGGAGCG CUGAUGAGGCCGUUAGGCCGAA AAUCCCAA | 3968 |
| 1541 | AUUACGCU C CCUCAAGG | 192 | CCUUGAGG CUGAUGAGGCCGUUAGGCCGAA AGCGUAAU | 3969 |
| 1545 | CGCUCCCU C AAGGAGAU | 193 | AUCUCCUU CUGAUGAGGCCGUUAGGCCGAA AGGGAGCG | 3970 |
| 1554 | AAGGAGAU A AGUGAUGG | 194 | CCAUCACU CUGAUGAGGCCGUUAGGCCGAA AUCUCCUU | 3971 |
| 1572 | GAUGUGAU A AUUUCAGG | 195 | CCUGAAAU CUGAUGAGGCCGUUAGGCCGAA AUCACAUC | 3972 |
| 1575 | GUGAUAAU U UCAGGAAA | 196 | UUUCCUGA CUGAUGAGGCCGUUAGGCCGAA AUUAUCAC | 3973 |
| 1576 | UGAUAAUU U CAGGAAAC | 197 | GUUUCCUG CUGAUGAGGCCGUUAGGCCGAA AAUUAUCA | 3974 |
| 1577 | GAUAAUUU C AGGAAACA | 198 | UGUUUCCU CUGAUGAGGCCGUUAGGCCGAA AAAUUAUC | 3975 |
| 1591 | ACAAAAAU U UGUGCUAU | 199 | AUAGCACA CUGAUGAGGCCGUUAGGCCGAA AUUUUUGU | 3976 |
| 1592 | CAAAAAUU U GUGCUAUG | 200 | CAUAGCAC CUGAUGAGGCCGUUAGGCCGAA AAUUUUUG | 3977 |
| 1598 | UUUGUGCU A UGCAAAUA | 201 | UAUUUGCA CUGAUGAGGCCGUUAGGCCGAA AGCACAAA | 3978 |
| 1606 | AUGCAAAU A CAAUAAAC | 202 | GUUUAUUG CUGAUGAGGCCGUUAGGCCGAA AUUUGCAU | 3979 |
| 1611 | AAUACAAU A AACUGGAA | 203 | UUCCAGUU CUGAUGAGGCCGUUAGGCCGAA AUUGUAUU | 3980 |
| 1628 | AAAACUGU U UGGGACCU | 204 | AGGUCCCA CUGAUGAGGCCGUUAGGCCGAA ACAGUUUU | 3981 |
| 1629 | AAACUGUU U GGGACCUC | 205 | GAGGUCCC CUGAUGAGGCCGUUAGGCCGAA AACAGUUU | 3982 |
| 1637 | UGGGACCU C CGGUCAGA | 206 | UCUGACCG CUGAUGAGGCCGUUAGGCCGAA AGGUCCCA | 3983 |
| 1642 | CCUCCGGU C AGAAAACC | 207 | GGUUUUCU CUGAUGAGGCCGUUAGGCCGAA ACCGGAGG | 3984 |
| 1656 | ACCAAAAU U AUAAGCAA | 208 | UUGCUUAU CUGAUGAGGCCGUUAGGCCGAA AUUUUGGU | 3985 |
| 1657 | CCAAAAUU A UAAGCAAC | 209 | GUUGCUUA CUGAUGAGGCCGUUAGGCCGAA AAUUUUGG | 3986 |
| 1659 | AAAAUUAU A AGCAACAG | 210 | CUGUUGCU CUGAUGAGGCCGUUAGGCCGAA AUAAUUUU | 3987 |
| 1701 | GGCCAGGU C UGCCAUGC | 211 | GCAUGGCA CUGAUGAGGCCGUUAGGCCGAA ACCUGGCC | 3988 |
| 1712 | CCAUGCCU U GUGCUCCC | 212 | GGGAGCAC CUGAUGAGGCCGUUAGGCCGAA AGGCAUGG | 3989 |
| 1718 | CUUGUGCU C CCCCGAGG | 213 | CCUCGGGG CUGAUGAGGCCGUUAGGCCGAA AGCACAAG | 3990 |
| 1758 | GACUGCGU C UCUUGCCG | 214 | CGGCAAGA CUGAUGAGGCCGUUAGGCCGAA ACGCAGUC | 3991 |
| 1760 | CUGCGUCU C UUGCCGGA | 215 | UCCGGCAA CUGAUGAGGCCGUUAGGCCGAA AGACGCAG | 3992 |
| 1762 | GCGUCUCU U GCCGGAAU | 216 | AUUCCGGC CUGAUGAGGCCGUUAGGCCGAA AGAGACGC | 3993 |
| 1773 | CGGAAUGU C AGCCGAGG | 217 | CCUCGGCU CUGAUGAGGCCGUUAGGCCGAA ACAUUCCG | 3994 |
| 1809 | UGCAAGCU U CUGGAGGG | 218 | CCCUCCAG CUGAUGAGGCCGUUAGGCCGAA AGCUUGCA | 3995 |
| 1810 | GCAAGCUU C UGGAGGGU | 219 | ACCCUCCA CUGAUGAGGCCGUUAGGCCGAA AAGCUUGC | 3996 |
| 1832 | AAGGGAGU U UGUGGAGA | 220 | UCUCCACA CUGAUGAGGCCGUUAGGCCGAA ACUCCCUU | 3997 |
| 1833 | AGGGAGUU U GUGGAGAA | 221 | UUCUCCAC CUGAUGAGGCCGUUAGGCCGAA AACUCCCU | 3998 |
| 1844 | GGAGAACU C UGAGUGCA | 222 | UGCACUCA CUGAUGAGGCCGUUAGGCCGAA AGUUCUCC | 3999 |
| 1854 | GAGUGCAU A CAGUGCCA | 223 | UGGCACUG CUGAUGAGGCCGUUAGGCCGAA AUGCACUC | 4000 |
| 1879 | GCCUGCCU C AGGCCAUG | 224 | CAUGGCCU CUGAUGAGGCCGUUAGGCCGAA AGGCAGGC | 4001 |
| 1893 | AUGAACAU C ACCUGCAC | 225 | GUGCAGGU CUGAUGAGGCCGUUAGGCCGAA AUGUUCAU | 4002 |
| 1924 | ACAACUGU A UCCAGUGU | 226 | ACACUGGA CUGAUGAGGCCGUUAGGCCGAA ACAGUUGU | 4003 |
| 1926 | AACUGUAU C CAGUGUGC | 227 | GCACACUG CUGAUGAGGCCGUUAGGCCGAA AUACAGUU | 4004 |
| 1940 | UGCCCACU A CAUUGACG | 228 | CGUCAAUG CUGAUGAGGCCGUUAGGCCGAA AGUGGGCA | 4005 |
| 1944 | CACUACAU U GACGGCCC | 229 | GGGCCGUC CUGAUGAGGCCGUUAGGCCGAA AUGUAGUG | 4006 |
| 1962 | CACUGCGU C AAGACCUG | 230 | CAGGUCUU CUGAUGAGGCCGUUAGGCCGAA ACGCAGUG | 4007 |
| 1983 | GCAGGAGU C AUGGGAGA | 231 | UCUCCCAU CUGAUGAGGCCGUUAGGCCGAA ACUCCUGC | 4008 |
| 2007 | ACCCUGGU C UGGAAGUA | 232 | UACUUCCA CUGAUGAGGCCGUUAGGCCGAA ACCAGGGU | 4009 |
| 2015 | CUGGAAGU A CGCAGACG | 233 | CGUCUGCG CUGAUGAGGCCGUUAGGCCGAA ACUUCCAG | 4010 |
| 2050 | UGUGCCAU C CAAACUGC | 234 | GCAGUUUG CUGAUGAGGCCGUUAGGCCGAA AUGGCACA | 4011 |
| 2063 | CUGCACCU A CGGAUGCA | 235 | UGCAUCCG CUGAUGAGGCCGUUAGGCCGAA AGGUGCAG | 4012 |
| 2083 | GGCCAGGU C UUGAAGGC | 236 | GCCUUCAA CUGAUGAGGCCGUUAGGCCGAA ACCUGGCC | 4013 |
| 2085 | CCAGGUCU U GAAGGCUG | 237 | CAGCCUUC CUGAUGAGGCCGUUAGGCCGAA AGACCUGG | 4014 |
| 2095 | AAGGCUGU C CAACGAAU | 238 | AUUCGUUG CUGAUGAGGCCGUUAGGCCGAA ACAGCCUU | 4015 |
| 2110 | AUGGGCCU A AGAUCCCG | 239 | CGGGAUCU CUGAUGAGGCCGUUAGGCCGAA AGGCCCAU | 4016 |
| 2115 | CCUAAGAU C CCGUCCAU | 240 | AUGGACGG CUGAUGAGGCCGUUAGGCCGAA AUCUUAGG | 4017 |
| 2120 | GAUCCCGU C CAUCGCCA | 241 | UGGCGAUG CUGAUGAGGCCGUUAGGCCGAA ACGGGAUC | 4018 |
| 2124 | CCGUCCAU C GCCACUGG | 242 | CCAGUGGC CUGAUGAGGCCGUUAGGCCGAA AUGGACGG | 4019 |
| 2148 | GGGGCCCU C CUCUUGCU | 243 | AGCAAGAG CUGAUGAGGCCGUUAGGCCGAA AGGGCCCC | 4020 |
| 2151 | GCCCUCCU C UUGCUGCU | 244 | AGCAGCAA CUGAUGAGGCCGUUAGGCCGAA AGGAGGGC | 4021 |
| 2153 | CCUCCUCU U GCUGCUGG | 245 | CCAGCAGC CUGAUGAGGCCGUUAGGCCGAA AGAGGAGG | 4022 |
| 2178 | CUGGGGAU C GGCCUCUU | 246 | AAGAGGCC CUGAUGAGGCCGUUAGGCCGAA AUCCCCAG | 4023 |
| 2184 | AUCGGCCU C UUCAUGCG | 247 | CGCAUGAA CUGAUGAGGCCGUUAGGCCGAA AGGCCGAU | 4024 |
| 2186 | CGGCCUCU U CAUGCGAA | 248 | UUCGCAUG CUGAUGAGGCCGUUAGGCCGAA AGAGGCCG | 4025 |
| 2187 | GGCCUCUU C AUGCGAAG | 249 | CUUCGCAU CUGAUGAGGCCGUUAGGCCGAA AAGAGGCC | 4026 |
| 2205 | CGCCACAU C GUUCGGAA | 250 | UUCCGAAC CUGAUGAGGCCGUUAGGCCGAA AUGUGGCG | 4027 |
| 2208 | CACAUCGU U CGGAAGCG | 251 | CGCUUCCG CUGAUGAGGCCGUUAGGCCGAA ACGAUGUG | 4028 |
| 2209 | ACAUCGUU C GGAAGCGC | 252 | GCGCUUCC CUGAUGAGGCCGUUAGGCCGAA AACGAUGU | 4029 |
| 2250 | AGGGAGCU U GUGGAGCC | 253 | GGCUCCAC CUGAUGAGGCCGUUAGGCCGAA AGCUCCCU | 4030 |
| 2260 | UGGAGCCU C UUACACCC | 254 | GGGUGUAA CUGAUGAGGCCGUUAGGCCGAA AGGCUCCA | 4031 |
| 2262 | GAGCCUCU U ACACCCAG | 255 | CUGGGUGU CUGAUGAGGCCGUUAGGCCGAA AGAGGCUC | 4032 |
| 2263 | AGCCUCUU A CACCCAGU | 256 | ACUGGGUG CUGAUGAGGCCGUUAGGCCGAA AAGAGGCU | 4033 |
| 2281 | GAGAAGCU C CCAACCAA | 257 | UUGGUUGG CUGAUGAGGCCGUUAGGCCGAA AGCUUCUC | 4034 |
| 2293 | ACCAAGCU C UCUUGAGG | 258 | CCUCAAGA CUGAUGAGGCCGUUAGGCCGAA AGCUUGGU | 4035 |
| 2295 | CAAGCUCU C UUGAGGAU | 259 | AUCCUCAA CUGAUGAGGCCGUUAGGCCGAA AGAGCUUG | 4036 |
| 2297 | AGCUCUCU U GAGGAUCU | 260 | AGAUCCUC CUGAUGAGGCCGUUAGGCCGAA AGAGAGCU | 4037 |
| 2304 | UUGAGGAU C UUGAAGGA | 261 | UCCUUCAA CUGAUGAGGCCGUUAGGCCGAA AUCCUCAA | 4038 |
| 2306 | GAGGAUCU U GAAGGAAA | 262 | UUUCCUUC CUGAUGAGGCCGUUAGGCCGAA AGAUCCUC | 4039 |
| 2321 | AACUGAAU U CAAAAAGA | 263 | UCUUUUUG CUGAUGAGGCCGUUAGGCCGAA AUUCAGUU | 4040 |
| 2322 | ACUGAAUU C AAAAAGAU | 264 | AUCUUUUU CUGAUGAGGCCGUUAGGCCGAA AAUUCAGU | 4041 |
| 2331 | AAAAAGAU C AAAGUGCU | 265 | AGCACUUU CUGAUGAGGCCGUUAGGCCGAA AUCUUUUU | 4042 |
| 2345 | GCUGGGCU C CGGUGCGU | 266 | ACGCACCG CUGAUGAGGCCGUUAGGCCGAA AGCCCAGC | 4043 |
| 2354 | CGGUGCGU U CGGCACGG | 267 | CCGUGCCG CUGAUGAGGCCGUUAGGCCGAA ACGCACCG | 4044 |
| 2355 | GGUGCGUU C GGCACGGU | 268 | ACCGUGCC CUGAUGAGGCCGUUAGGCCGAA AACGCACC | 4045 |
| 2366 | CACGGUGU A UAAGGGAC | 269 | GUCCCUUA CUGAUGAGGCCGUUAGGCCGAA ACACCGUG | 4046 |
| 2368 | CGGUGUAU A AGGGACUC | 270 | GAGUCCCU CUGAUGAGGCCGUUAGGCCGAA AUACACCG | 4047 |
| 2376 | AAGGGACU C UGGAUCCC | 271 | GGGAUCCA CUGAUGAGGCCGUUAGGCCGAA AGUCCCUU | 4048 |
| 2382 | CUCUGGAU C CCAGAAGG | 272 | CCUUCUGG CUGAUGAGGCCGUUAGGCCGAA AUCCAGAG | 4049 |
| 2400 | GAGAAAGU U AAAAUUCC | 273 | GGAAUUUU CUGAUGAGGCCGUUAGGCCGAA ACUUUCUC | 4050 |
| 2401 | AGAAAGUU A AAAUUCCC | 274 | GGGAAUUU CUGAUGAGGCCGUUAGGCCGAA AACUUUCU | 4051 |
| 2406 | GUUAAAAU U CCCGUCGC | 275 | GCGACGGG CUGAUGAGGCCGUUAGGCCGAA AUUUUAAC | 4052 |
| 2407 | UUAAAAUU C CCGUCGCU | 276 | AGCGACGG CUGAUGAGGCCGUUAGGCCGAA AAUUUUAA | 4053 |
| 2412 | AUUCCCGU C GCUAUCAA | 277 | UUGAUAGC CUGAUGAGGCCGUUAGGCCGAA ACGGGAAU | 4054 |
| 2416 | CCGUCGCU A UCAAGGAA | 278 | UUCCUUGA CUGAUGAGGCCGUUAGGCCGAA AGCGACGG | 4055 |
| 2418 | GUCGCUAU C AAGGAAUU | 279 | AAUUCCUU CUGAUGAGGCCGUUAGGCCGAA AUAGCGAC | 4056 |
| 2426 | CAAGGAAU U AAGAGAAG | 280 | CUUCUCUU CUGAUGAGGCCGUUAGGCCGAA AUUCCUUG | 4057 |
| 2427 | AAGGAAUU A AGAGAAGC | 281 | GCUUCUCU CUGAUGAGGCCGUUAGGCCGAA AAUUCCUU | 4058 |
| 2441 | AGCAACAU C UCCGAAAG | 282 | CUUUCGGA CUGAUGAGGCCGUUAGGCCGAA AUGUUGCU | 4059 |
| 2443 | CAACAUCU C CGAAAGCC | 283 | GGCUUUCG CUGAUGAGGCCGUUAGGCCGAA AGAUGUUG | 4060 |
| 2463 | AAGGAAAU C CUCGAUGA | 284 | UCAUCGAG CUGAUGAGGCCGUUAGGCCGAA AUUUCCUU | 4061 |
| 2466 | GAAAUCCU C GAUGAAGC | 285 | GCUUCAUC CUGAUGAGGCCGUUAGGCCGAA AGGAUUUC | 4062 |
| 2477 | UGAAGCCU A CGUGAUGG | 286 | CCAUCACG CUGAUGAGGCCGUUAGGCCGAA AGGCUUCA | 4063 |
| 2526 | CUGGGCAU C UGCCUCAC | 287 | GUGAGGCA CUGAUGAGGCCGUUAGGCCGAA AUGCCCAG | 4064 |
| 2532 | AUCUGCCU C ACCUCCAC | 288 | GUGGAGGU CUGAUGAGGCCGUUAGGCCGAA AGGCAGAU | 4065 |
| 2537 | CCUCACCU C CACCGUGC | 289 | GCACGGUG CUGAUGAGGCCGUUAGGCCGAA AGGUGAGG | 4066 |
| 2550 | GUGCAACU C AUCACGCA | 290 | UGCGUGAU CUGAUGAGGCCGUUAGGCCGAA AGUUGCAC | 4067 |
| 2553 | CAACUCAU C ACGCAGCU | 291 | AGCUGCGU CUGAUGAGGCCGUUAGGCCGAA AUGAGUUG | 4068 |
| 2562 | ACGCAGCU C AUGCCCUU | 292 | AAGGGCAU CUGAUGAGGCCGUUAGGCCGAA AGCUGCGU | 4069 |
| 2570 | CAUGCCCU U CGGCUGCC | 293 | GGCAGCCG CUGAUGAGGCCGUUAGGCCGAA AGGGCAUG | 4070 |
| 2571 | AUGCCCUU C GGCUGCCU | 294 | AGGCAGCC CUGAUGAGGCCGUUAGGCCGAA AAGGGCAU | 4071 |
| 2580 | GGCUGCCU C CUGGACUA | 295 | UAGUCCAG CUGAUGAGGCCGUUAGGCCGAA AGGCAGCC | 4072 |
| 2588 | CCUGGACU A UGUCCGGG | 296 | CCCGGACA CUGAUGAGGCCGUUAGGCCGAA AGUCCAGG | 4073 |
| 2592 | GACUAUGU C CGGGAACA | 297 | UGUUCCCG CUGAUGAGGCCGUUAGGCCGAA ACAUAGUC | 4074 |
| 2611 | AAGACAAU A UUGGCUCC | 298 | GGAGCCAA CUGAUGAGGCCGUUAGGCCGAA AUUGUCUU | 4075 |
| 2613 | GACAAUAU U GGCUCCCA | 299 | UGGGAGCC CUGAUGAGGCCGUUAGGCCGAA AUAUUGUC | 4076 |
| 2618 | UAUUGGCU C CCAGUACC | 300 | GGUACUGG CUGAUGAGGCCGUUAGGCCGAA AGCCAAUA | 4077 |
| 2624 | CUCCCAGU A CCUGCUCA | 301 | UGAGCAGG CUGAUGAGGCCGUUAGGCCGAA ACUGGGAG | 4078 |
| 2631 | UACCUGCU C AACUGGUG | 302 | CACCAGUU CUGAUGAGGCCGUUAGGCCGAA AGCAGGUA | 4079 |
| 2649 | GUGCAGAU C GCAAAGGG | 303 | CCCUUUGC CUGAUGAGGCCGUUAGGCCGAA AUCUGCAC | 4080 |
| 2666 | CAUGAACU A CUUGGAGG | 304 | CCUCCAAG CUGAUGAGGCCGUUAGGCCGAA AGUUCAUG | 4081 |
| 2669 | GAACUACU U GGAGGACC | 305 | GGUCCUCC CUGAUGAGGCCGUUAGGCCGAA AGUAGUUC | 4082 |
| 2680 | AGGACCGU C GCUUGGUG | 306 | CACCAAGC CUGAUGAGGCCGUUAGGCCGAA ACGGUCCU | 4083 |
| 2684 | CCGUCGCU U GGUGCACC | 307 | GGUGCACC CUGAUGAGGCCGUUAGGCCGAA AGCGACGG | 4084 |
| 2715 | AGGAACGU A CUGGUGAA | 308 | UUCACCAG CUGAUGAGGCCGUUAGGCCGAA ACGUUCCU | 4085 |
| 2739 | CAGCAUGU C AAGAUCAC | 309 | GUGAUCUU CUGAUGAGGCCGUUAGGCCGAA ACAUGCUG | 4086 |
| 2745 | GUCAAGAU C ACAGAUUU | 310 | AAAUCUGU CUGAUGAGGCCGUUAGGCCGAA AUCUUGAC | 4087 |
| 2752 | UCACAGAU U UUGGGCUG | 311 | CAGCCCAA CUGAUGAGGCCGUUAGGCCGAA AUCUGUGA | 4088 |
| 2753 | CACAGAUU U UGGGCUGG | 312 | CCAGCCCA CUGAUGAGGCCGUUAGGCCGAA AAUCUGUG | 4089 |
| 2754 | ACAGAUUU U GGGCUGGC | 313 | GCCAGCCC CUGAUGAGGCCGUUAGGCCGAA AAAUCUGU | 4090 |
| 2792 | GAAAGAAU A CCAUGCAG | 314 | CUGCAUGG CUGAUGAGGCCGUUAGGCCGAA AUUCUUUC | 4091 |
| 2818 | AAGUGCCU A UCAAGUGG | 315 | CCACUUGA CUGAUGAGGCCGUUAGGCCGAA AGGCACUU | 4092 |
| 2820 | GUGCCUAU C AAGUGGAU | 316 | AUCCACUU CUGAUGAGGCCGUUAGGCCGAA AUAGGCAC | 4093 |
| 2834 | GAUGGCAU U GGAAUCAA | 317 | UUGAUUCC CUGAUGAGGCCGUUAGGCCGAA AUGCCAUC | 4094 |
| 2840 | AUUGGAAU C AAUUUUAC | 318 | GUAAAAUU CUGAUGAGGCCGUUAGGCCGAA AUUCCAAU | 4095 |
| 2844 | GAAUCAAU U UUACACAG | 319 | CUGUGUAA CUGAUGAGGCCGUUAGGCCGAA AUUGAUUC | 4096 |
| 2845 | AAUCAAUU U UACACAGA | 320 | UCUGUGUA CUGAUGAGGCCGUUAGGCCGAA AAUUGAUU | 4097 |
| 2846 | AUCAAUUU U ACACAGAA | 321 | UUCUGUGU CUGAUGAGGCCGUUAGGCCGAA AAAUUGAU | 4098 |
| 2847 | UCAAUUUU A CACAGAAU | 322 | AUUCUGUG CUGAUGAGGCCGUUAGGCCGAA AAAAUUGA | 4099 |
| 2856 | CACAGAAU C UAUACCCA | 323 | UGGGUAUA CUGAUGAGGCCGUUAGGCCGAA AUUCUGUG | 4100 |
| 2858 | CAGAAUCU A UACCCACC | 324 | GGUGGGUA CUGAUGAGGCCGUUAGGCCGAA AGAUUCUG | 4101 |
| 2860 | GAAUCUAU A CCCACCAG | 325 | CUGGUGGG CUGAUGAGGCCGUUAGGCCGAA AUAGAUUC | 4102 |
| 2877 | AGUGAUGU C UGGAGCUA | 326 | UAGCUCCA CUGAUGAGGCCGUUAGGCCGAA ACAUCACU | 4103 |
| 2885 | CUGGAGCU A CGGGQUGA | 327 | UCACCCCG CUGAUGAGGCCGUUAGGCCGAA AGCUCCAG | 4104 |
| 2898 | GUGACCGU U UGGGAGUU | 328 | AACUCCCA CUGAUGAGGCCGUUAGGCCGAA ACGGUCAC | 4105 |
| 2899 | UGACCGUU U GGGAGUUG | 329 | CAACUCCC CUGAUGAGGCCGUUAGGCCGAA AACGGUCA | 4106 |
| 2906 | UUGGGAGU U GAUGACCU | 330 | AGGUCAUC CUGAUGAGGCCGUUAGGCCGAA ACUCCCAA | 4107 |
| 2915 | GAUGACCU U UGGAUCCA | 331 | UGGAUCCA CUGAUGAGGCCGUUAGGCCGAA AGGUCAUC | 4108 |
| 2916 | AUGACCUU U GGAUCCAA | 332 | UUGGAUCC CUGAUGAGGCCGUUAGGCCGAA AAGGUCAU | 4109 |
| 2921 | CUUUGGAU C CAAGCCAU | 333 | AUGGCUUG CUGAUGAGGCCGUUAGGCCGAA AUCCAAAG | 4110 |
| 2930 | CAAGCCAU A UGACGGAA | 334 | UUCCGUCA CUGAUGAGGCCGUUAGGCCGAA AUGGCUUG | 4111 |
| 2940 | GACGGAAU C CCUGCCAG | 335 | CUGGCAGG CUGAUGAGGCCGUUAGGCCGAA AUUCCGUC | 4112 |
| 2955 | AGCGAGAU C UCCUCCAU | 336 | AUGGAGGA CUGAUGAGGCCGUUAGGCCGAA AUCUCGCU | 4113 |
| 2957 | CGAGAUCU C CUCCAUCC | 337 | GGAUGGAG CUGAUGAGGCCGUUAGGCCGAA AGAUCUCG | 4114 |
| 2960 | GAUCUCCU C CAUCCUGG | 338 | CCAGGAUG CUGAUGAGGCCGUUAGGCCGAA AGGAGAUC | 4115 |
| 2964 | UCCUCCAU C CUGGAGAA | 339 | UUCUCCAG CUGAUGAGGCCGUUAGGCCGAA AUGGAGGA | 4116 |
| 2985 | GAACGCCU C CCUCAGCC | 340 | GGCUGAGG CUGAUGAGGCCGUUAGGCCGAA AGGCGUUC | 4117 |
| 2989 | GCCUCCCU C AGCCACCC | 341 | GGGUGGCU CUGAUGAGGCCGUUAGGCCGAA AGGGAGGC | 4118 |
| 3000 | CCACCCAU A UGUACCAU | 342 | AUGGUACA CUGAUGAGGCCGUUAGGCCGAA AUGGGUGG | 4119 |
| 3004 | CCAUAUGU A CCAUCGAU | 343 | AUCGAUGG CUGAUGAGGCCGUUAGGCCGAA ACAUAUGG | 4120 |
| 3009 | UGUACCAU C GAUGUCUA | 344 | UAGACAUC CUGAUGAGGCCGUUAGGCCGAA AUGGUACA | 4121 |
| 3015 | AUCGAUGU C UACAUGAU | 345 | AUCAUGUA CUGAUGAGGCCGUUAGGCCGAA ACAUCGAU | 4122 |
| 3017 | CGAUGUCU A CAUGAUCA | 346 | UGAUCAUG CUGAUGAGGCCGUUAGGCCGAA AGACAUCG | 4123 |
| 3024 | UACAUGAU C AUGGUCAA | 347 | UUGACCAU CUGAUGAGGCCGUUAGGCCGAA AUCAUGUA | 4124 |
| 3030 | AUCAUGGU C AAGUGCUG | 348 | CAGCACUU CUGAUGAGGCCGUUAGGCCGAA ACCAUGAU | 4125 |
| 3045 | UGGAUGAU A GACGCAGA | 349 | UCUGCGUC CUGAUGAGGCCGUUAGGCCGAA AUCAUCCA | 4126 |
| 3055 | ACGCAGAU A GUCGCCCA | 350 | UGGGCGAC CUGAUGAGGCCGUUAGGCCGAA AUCUGCGU | 4127 |
| 3058 | CAGAUAGU C GCCCAAAG | 351 | CUUUGGGC CUGAUGAGGCCGUUAGGCCGAA ACUAUCUG | 4128 |
| 3068 | CCCAAAGU U CCGUGAGU | 352 | ACUCACGG CUGAUGAGGCCGUUAGGCCGAA ACUUUGGG | 4129 |
| 3069 | CCAAAGUU C CGUGAGUU | 353 | AACUCACG CUGAUGAGGCCGUUAGGCCGAA AACUUUGG | 4130 |
| 3077 | CCGUGAGU U GAUCAUCG | 354 | CGAUGAUC CUGAUGAGGCCGUUAGGCCGAA ACUCACGG | 4131 |
| 3081 | GAGUUGAU C AUCGAAUU | 355 | AAUUCGAU CUGAUGAGGCCGUUAGGCCGAA AUCAACUC | 4132 |
| 3084 | UUGAUCAU C GAAUUCUC | 356 | GAGAAUUC CUGAUGAGGCCGUUAGGCCGAA AUGAUCAA | 4133 |
| 3089 | CAUCGAAU U CUCCAAAA | 357 | UUUUGGAG CUGAUGAGGCCGUUAGGCCGAA AUUCGAUG | 4134 |
| 3090 | AUCGAAUU C UCCAAAAU | 358 | AUUUUGGA CUGAUGAGGCCGUUAGGCCGAA AAUUCGAU | 4135 |
| 3092 | CGAAUUCU C CAAAAUGG | 359 | CCAUUUUG CUGAUGAGGCCGUUAGGCCGAA AGAAUUCG | 4136 |
| 3119 | CCAGCGCU A CCUUGUCA | 360 | UGACAAGG CUGAUGAGGCCGUUAGGCCGAA AGCGCUGG | 4137 |
| 3123 | CGCUACCU U GUCAUUCA | 361 | UGAAUGAC CUGAUGAGGCCGUUAGGCCGAA AGGUAGCG | 4138 |
| 3126 | UACCUUGU C AUUCAGGG | 362 | CCCUGAAU CUGAUGAGGCCGUUAGGCCGAA ACAAGGUA | 4139 |
| 3129 | CUUGUCAU U CAGGGGGA | 363 | UCCCCCUG CUGAUGAGGCCGUUAGGCCGAA AUGACAAG | 4140 |
| 3130 | UUGUCAUU C AGGGGGAU | 364 | AUCCCCCU CUGAUGAGGCCGUUAGGCCGAA AAUGACAA | 4141 |
| 3151 | GAAUGCAU U UGCCAAGU | 365 | ACUUGGCA CUGAUGAGGCCGUUAGGCCGAA AUGCAUUC | 4142 |
| 3152 | AAUGCAUU U GCCAAGUC | 366 | GACUUGGC CUGAUGAGGCCGUUAGGCCGAA AAUGCAUU | 4143 |
| 3160 | UGCCAAGU C CUACAGAC | 367 | GUCUGUAG CUGAUGAGGCCGUUAGGCCGAA ACUUGGCA | 4144 |
| 3163 | CAAGUCCU A CAGACUCC | 368 | GGAGUCUG CUGAUGAGGCCGUUAGGCCGAA AGGACUUG | 4145 |
| 3170 | UACAGACU C CAACUUCU | 369 | AGAAGUUG CUGAUGAGGCCGUUAGGCCGAA AGUCUGUA | 4146 |
| 3176 | CUCCAACU U CUACCGUG | 370 | CACGGUAG CUGAUGAGGCCGUUAGGCCGAA AGUUGGAG | 4147 |
| 3177 | UCCAACUU C UACCGUGC | 371 | GCACGGUA CUGAUGAGGCCGUUAGGCCGAA AAGUUGGA | 4148 |
| 3179 | CAACUUCU A CCGUGCCC | 372 | GGGCACGG CUGAUGAGGCCGUUAGGCCGAA AGAAGUUG | 4149 |
| 3233 | CGACGAGU A CCUCAUCC | 373 | GGAUGAGG CUGAUGAGGCCGUUAGGCCGAA ACUCGUCG | 4150 |
| 3237 | GAGUACCU C AUCCCACA | 374 | UGUGGGAU CUGAUGAGGCCGUUAGGCCGAA AGGUACUC | 4151 |
| 3240 | UACCUCAU C CCACAGCA | 375 | UGCUGUGG CUGAUGAGGCCGUUAGGCCGAA AUGAGGUA | 4152 |
| 3254 | GCAGGGCU U CUUCAGCA | 376 | UGCUGAAG CUGAUGAGGCCGUUAGGCCGAA AGCCCUGC | 4153 |
| 3255 | CAGGGCUU C UUCAGCAG | 377 | CUGCUGAA CUGAUGAGGCCGUUAGGCCGAA AAGCCCUG | 4154 |
| 3257 | GGGCUUCU U CAGCAGCC | 378 | GGCUGCUG CUGAUGAGGCCGUUAGGCCGAA AGAAGCCC | 4155 |
| 3258 | GGCUUCUU C AGCAGCCC | 379 | GGGCUGCU CUGAUGAGGCCGUUAGGCCGAA AAGAAGCC | 4156 |
| 3269 | CAGCCCCU C CACGUCAC | 380 | GUGACGUG CUGAUGAGGCCGUUAGGCCGAA AGGGGCUG | 4157 |
| 3275 | CUCCACGU C ACGGACUC | 381 | GAGUCCGU CUGAUGAGGCCGUUAGGCCGAA ACGUGGAG | 4158 |
| 3283 | CACGGACU C CCCUCCUG | 382 | CAGGAGGG CUGAUGAGGCCGUUAGGCCGAA AGUCCGUG | 4159 |
| 3288 | ACUCCCCU C CUGAGCUC | 383 | GACCUCAG CUGAUGAGGCCGUUAGGCCGAA AGGGGAGU | 4160 |
| 3296 | CCUGAGCU C UCUGAGUG | 384 | CACUCAGA CUGAUGAGGCCGUUAGGCCGAA AGCUCAGG | 4161 |
| 3298 | UGAGCUCU C UGAGUGCA | 385 | UGCACUCA CUGAUGAGGCCGUUAGGCCGAA AGAGCUCA | 4162 |
| 3319 | GCAACAAU U CCACCGUG | 386 | CACGGUGG CUGAUGAGGCCGUUAGGCCGAA AUUGUUGC | 4163 |
| 3320 | CAACAAUU C CACCGUGG | 387 | CCACGGUG CUGAUGAGGCCGUUAGGCCGAA AAUUGUUG | 4164 |
| 3331 | CCGUGGCU U GCAUUGAU | 388 | AUCAAUGC CUGAUGAGGCCGUUAGGCCGAA AGCCACGG | 4165 |
| 3336 | GCUUGCAU U GAUAGAAA | 389 | UUUCUAUC CUGAUGAGGCCGUUAGGCCGAA AUGCAAGC | 4166 |
| 3340 | GCAUUGAU A GAAAUGGG | 390 | CCCAUUUC CUGAUGAGGCCGUUAGGCCGAA AUCAAUGC | 4167 |
| 3361 | AAAGCUGU C CCAUCAAG | 391 | CUUGAUGG CUGAUGAGGCCGUUAGGCCGAA ACAGCUUU | 4168 |
| 3366 | UGUCCCAU C AAGGAAGA | 392 | UCUUCCUU CUGAUGAGGCCGUUAGGCCGAA AUGGGACA | 4169 |
| 3380 | AGACAGCU U CUUGCAGC | 393 | GCUGCAAG CUGAUGAGGCCGUUAGGCCGAA AGCUGUCU | 4170 |
| 3381 | GACAGCUU C UUGCAGCG | 394 | CGCUGCAA CUGAUGAGGCCGUUAGGCCGAA AAGCUGUC | 4171 |
| 3383 | CAGCUUCU U GCAGCGAU | 395 | AUCGCUGC CUGAUGAGGCCGUUAGGCCGAA AGAAGCUG | 4172 |
| 3392 | GCAGCGAU A CAGCUCAG | 396 | CUGAGCUG CUGAUGAGGCCGUUAGGCCGAA AUCGCUGC | 4173 |
| 3398 | AUACAGCU C AGACCCCA | 397 | UGGGGUCU CUGAUGAGGCCGUUAGGCCGAA AGCUGUAU | 4174 |
| 3416 | AGGCGCCU U GACUGAGG | 398 | CCUCAGUC CUGAUGAGGCCGUUAGGCCGAA AGGCGCCU | 4175 |
| 3432 | GACAGCAU A GACGACAC | 399 | GUGUCGUC CUGAUGAGGCCGUUAGGCCGAA AUGCUGUC | 4176 |
| 3443 | CGACACCU U CCUCCCAG | 400 | CUGGGAGG CUGAUGAGGCCGUUAGGCCGAA AGGUGUCG | 4177 |
| 3444 | GACACCUU C CUCCCAGU | 401 | ACUGGGAG CUGAUGAGGCCGUUAGGCCGAA AAGGUGUC | 4178 |
| 3447 | ACCUUCCU C CCAGUGCC | 402 | GGCACUGG CUGAUGAGGCCGUUAGGCCGAA AGGAAGGU | 4179 |
| 3461 | GCCUGAAU A CAUAAACC | 403 | GGUUUAUG CUGAUGAGGCCGUUAGGCCGAA AUUCAGGC | 4180 |
| 3465 | GAAUACAU A AACCAGUC | 404 | GACUGGUU CUGAUGAGGCCGUUAGGCCGAA AUGUAUUC | 4181 |
| 3473 | AAACCAGU C CGUUCCCA | 405 | UGGGAACG CUGAUGAGGCCGUUAGGCCGAA ACUGGUUU | 4182 |
| 3477 | CAGUCCGU U CCCAAAAG | 406 | CUUUUGGG CUGAUGAGGCCGUUAGGCCGAA ACGGACUG | 4183 |
| 3478 | AGUCCGUU C CCAAAAGG | 407 | CCUUUUGG CUGAUGAGGCCGUUAGGCCGAA AACGGACU | 4184 |
| 3497 | CGCUGGCU C UGUGCAGA | 408 | UCUGCACA CUGAUGAGGCCGUUAGGCCGAA AGCCAGCG | 4185 |
| 3508 | UGCAGAAU C CUGUCUAU | 409 | AUAGACAG CUGAUGAGGCCGUUAGGCCGAA AUUCUGCA | 4186 |
| 3513 | AAUCCUGU C UAUCACAA | 410 | UUGUGAUA CUGAUGAGGCCGUUAGGCCGAA ACAGGAUU | 4187 |
| 3515 | UCCUGUCU A UCACAAUC | 411 | GAUUGUGA CUGAUGAGGCCGUUAGGCCGAA AGACAGGA | 4188 |
| 3517 | CUGUCUAU C ACAAUCAG | 412 | CUGAUUGU CUGAUGAGGCCGUUAGGCCGAA AUAGACAG | 4189 |
| 3523 | AUCACAAU C AGCCUCUG | 413 | CAGAGGCU CUGAUGAGGCCGUUAGGCCGAA AUUGUGAU | 4190 |
| 3529 | AUCAGCCU C UGAACCCC | 414 | GGGGUUCA CUGAUGAGGCCGUUAGGCCGAA AGGCUGAU | 4191 |
| 3560 | CCCACACU A CCAGGACC | 415 | GGUCCUGG CUGAUGAGGCCGUUAGGCCGAA AGUGUGGG | 4192 |
| 3599 | CCCCGAGU A UCUCAACA | 416 | UGUUGAGA CUGAUGAGGCCGUUAGGCCGAA ACUCGGGG | 4193 |
| 3601 | CCGAGUAU C UCAACACU | 417 | AGUGUUGA CUGAUGAGGCCGUUAGGCCGAA AUACUCGG | 4194 |
| 3603 | GAGUAUCU C AACACUGU | 418 | ACAGUGUU CUGAUGAGGCCGUUAGGCCGAA AGAUACUC | 4195 |
| 3612 | AACACUGU C CAGCCCAC | 419 | GUGGGCUG CUGAUGAGGCCGUUAGGCCGAA ACAGUGUU | 4196 |
| 3627 | ACCUGUGU C AACAGCAC | 420 | GUGCUGUU CUGAUGAGGCCGUUAGGCCGAA ACACAGGU | 4197 |
| 3638 | CAGCACAU U CGACAGCC | 421 | GGCUGUCG CUGAUGAGGCCGUUAGGCCGAA AUGUGCUG | 4198 |
| 3639 | AGCACAUU C GACAGCCC | 422 | GGGCUGUC CUGAUGAGGCCGUUAGGCCGAA AAUGUGCU | 4199 |
| 3681 | CACCAAAU U AGCCUGGA | 423 | UCCAGGCU CUGAUGAGGCCGUUAGGCCGAA AUUUGGUG | 4200 |
| 3682 | ACCAAAUU A GCCUGGAC | 424 | GUCCAGGC CUGAUGAGGCCGUUAGGCCGAA AAUUUGGU | 4201 |
| 3701 | CCCUGACU A CCAGCAGG | 425 | CCUGCUGG CUGAUGAGGCCGUUAGGCCGAA AGUCAGGG | 4202 |
| 3713 | GCAGGACU U CUUUCCCA | 426 | UGGGAAAG CUGAUGAGGCCGUUAGGCCGAA AGUCCUGC | 4203 |
| 3714 | CAGGACUU C UUUCCCAA | 427 | UUGGGAAA CUGAUGAGGCCGUUAGGCCGAA AAGUCCUG | 4204 |
| 3716 | GGACUUCU U UCCCAAGG | 428 | CCUUGGGA CUGAUGAGGCCGUUAGGCCGAA AGAAGUCC | 4205 |
| 3717 | GACUUCUU U CCCAAGGA | 429 | UCCUUCGG CUGAUGAGGCCGUUAGGCCGAA AAGAAGUC | 4206 |
| 3718 | ACUUCUUU C CCAAGGAA | 430 | UUCCUUGG CUGAUGAGGCCGUUAGGCCGAA AAAGAAGU | 4207 |
| 3744 | AAUGGCAU C UUUAAGGG | 431 | CCCUUAAA CUGAUGAGGCCGUUAGGCCGAA AUGCCAUU | 4208 |
| 3746 | UGGCAUCU U UAAGGGCU | 432 | AGCCCUUA CUGAUGAGGCCGUUAGGCCGAA AGAUGCCA | 4209 |
| 3747 | GGCAUCUU U AAGGGCUC | 433 | GAGCCCUU CUGAUGAGGCCGUUAGGCCGAA AAGAUGCC | 4210 |
| 3748 | GCAUCUUU A AGGGCUCC | 434 | GGAGCCCU CUGAUGAGGCCGUUAGGCCGAA AAAGAUGC | 4211 |
| 3755 | UAAGGGCU C CACAGCUG | 435 | CAGCUGUG CUGAUGAGGCCGUUAGGCCGAA AGCCCUUA | 4212 |
| 3776 | UGCAGAAU A CCUAAGGG | 436 | CCCUUAGG CUGAUGAGGCCGUUAGGCCGAA AUUCUGCA | 4213 |
| 3780 | GAAUACCU A AGGGUCGC | 437 | GCGACCCU CUGAUGAGGCCGUUAGGCCGAA AGGUAUUC | 4214 |
| 3786 | CUAAGGGU C GCGCCACA | 438 | UGUGGCGC CUGAUGAGGCCGUUAGGCCGAA ACCCUUAG | 4215 |
| 3806 | CAGUGAAU U UAUUGGAG | 439 | CUCCAAUA CUGAUGAGGCCGUUAGGCCGAA AUUCACUG | 4216 |
| 3807 | AGUGAAUU U AUUGGAGC | 440 | GCUCCAAU CUGAUGAGGCCGUUAGGCCGAA AAUUCACU | 4217 |
| 3808 | GUGAAUUU A UUGGAGCA | 441 | UGCUCCAA CUGAUGAGGCCGUUAGGCCGAA AAAUUCAC | 4218 |
| 3810 | GAAUUUAU U GGAGCAUG | 442 | CAUGCUCC CUGAUGAGGCCGUUAGGCCGAA AUAAAUUC | 4219 |
| 3831 | CGGAGGAU A GUAUGAGC | 443 | GCUCAUAC CUGAUGAGGCCGUUAGGCCGAA AUCCUCCG | 4220 |
| 3834 | AGGAUAGU A UGAGCCCU | 444 | AGGGCUCA CUGAUGAGGCCGUUAGGCCGAA ACUAUCCU | 4221 |
| 3843 | UGAGCCCU A AAAAUCCA | 445 | UGGAUUUU CUGAUGAGGCCGUUAGGCCGAA AGGGCUCA | 4222 |
| 3849 | CUAAAAAU C CAGACUCU | 446 | AGAGUCUG CUGAUGAGGCCGUUAGGCCGAA AUUUUUAG | 4223 |
| 3856 | UCCAGACU C UUUCGAUA | 447 | UAUCGAAA CUGAUGAGGCCGUUAGGCCGAA AGUCUGGA | 4224 |
| 3858 | CAGACUCU U UCGAUACC | 448 | GGUAUCGA CUGAUGAGGCCGUUAGGCCGAA AGAGUCUG | 4225 |
| 3859 | AGACUCUU U CGAUACCC | 449 | GGGUAUCG CUGAUGAGGCCGUUAGGCCGAA AAGAGUCU | 4226 |
| 3860 | GACUCUUU C GAUACCCA | 450 | UGGGUAUC CUGAUGAGGCCGUUAGGCCGAA AAAGAGUC | 4227 |
| 3864 | CUUUCGAU A CCCAGGAC | 451 | GUCCUGGG CUGAUGAGGCCGUUAGGCCGAA AUCGAAAG | 4228 |
| 3888 | CAGCAGGU C CUCCAUCC | 452 | GGAUGGAG CUGAUGAGGCCGUUAGGCCGAA ACCUGCUG | 4229 |
| 3891 | CAGGUCCU C CAUCCCAA | 453 | UUGGGAUG CUGAUGAGGCCGUUAGGCCGAA AGGACCUG | 4230 |
| 3895 | UCCUCCAU C CCAACAGC | 454 | GCUGUUGG CUGAUGAGGCCGUUAGGCCGAA AUGGAGGA | 4231 |
| 3915 | GCCCGCAU U AGCUCUUA | 455 | UAAGAGCU CUGAUGAGGCCGUUAGGCCGAA AUGCGGGC | 4232 |
| 3916 | CCCGCAUU A GCUCUUAG | 456 | CUAAGAGC CUGAUGAGGCCGUUAGGCCGAA AAUGCGGG | 4233 |
| 3920 | CAUUAGCU C UUAGACCC | 457 | GGGUCUAA CUGAUGAGGCCGUUAGGCCGAA AGCUAAUG | 4234 |
| 3922 | UUAGCUCU U AGACCCAC | 458 | GUGGGUCU CUGAUGAGGCCGUUAGGCCGAA AGAGCUAA | 4235 |
| 3923 | UAGCUCUU A GACCCACA | 459 | UGUGGGUC CUGAUGAGGCCGUUAGGCCGAA AAGAGCUA | 4236 |
| 3939 | AGACUGGU U UUGCAACG | 460 | CGUUGCAA CUGAUGAGGCCGUUAGGCCGAA ACCAGUCU | 4237 |
| 3940 | GACUGGUU U UGCAACGU | 461 | ACGUUGCA CUGAUGAGGCCGUUAGGCCGAA AACCAGUC | 4238 |
| 3941 | ACUGCUUU U GCAACGUU | 462 | AACGUUGC CUGAUGAGGCCGUUAGGCCCAA AAACCAGU | 4239 |
| 3949 | UGCAACGU U UACACCGA | 463 | UCGGUGUA CUGAUGAGGCCGUUAGGCCGAA ACGUUGCA | 4240 |
| 3950 | GCAACGUU U ACACCGAC | 464 | GUCGGUGU CUGAUGAGGCCGUUAGGCCGAA AACGUUGC | 4241 |
| 3951 | CAACGUUU A CACCGACU | 465 | AGUCGGUG CUGAUGAGGCCGUUAGGCCGAA AAACGUUG | 4242 |
| 3960 | CACCGACU A GCCAGGAA | 466 | UUCCUGGC CUGAUGAGGCCGUUAGGCCGAA AGUCGGUG | 4243 |
| 3971 | CAGGAAGU A CUUCCACC | 467 | GGUGGAAG CUGAUGAGGCCGUUAGGCCGAA ACUUCCUG | 4244 |
| 3974 | GAAGUACU U CCACCUCG | 468 | CGAGGUGG CUGAUGAGGCCGUUAGGCCGAA AGUACUUC | 4245 |
| 3975 | AAGUACUU C CACCUCGG | 469 | CCGAGGUG CUGAUGAGGCCGUUAGGCCGAA AAGUACUU | 4246 |
| 3981 | UUCCACCU C GGGCACAU | 470 | AUGUGCCC CUGAUGAGGCCGUUAGGCCGAA AGGUGGAA | 4247 |
| 3990 | GGGCACAU U UUGGGAAG | 471 | CUUCCCAA CUGAUGAGGCCGUUAGGCCGAA AUGUGCCC | 4248 |
| 3991 | GGCACAUU U UGGGAAGU | 472 | ACUUCCCA CUGAUGAGGCCGUUAGGCCGAA AAUGUGCC | 4249 |
| 3992 | GCACAUUU U GGGAAGUU | 473 | AACUUCCC CUGAUGAGGCCGUUAGGCCGAA AAAUGUGC | 4250 |
| 4000 | UGGGAAGU U GCAUUCCU | 474 | AGGAAUGC CUGAUGAGGCCGUUAGGCCGAA ACUUCCCA | 4251 |
| 4005 | AGUUGCAU U CCUUUGUC | 475 | GACAAAGG CUGAUGAGGCCGUUAGGCCGAA AUGCAACU | 4252 |
| 4006 | GUUGCAUU C CUUUGUCU | 476 | AGACAAAG CUGAUGAGGCCGUUAGGCCGAA AAUGCAAC | 4253 |
| 4009 | GCAUUCCU U UGUCUUCA | 477 | UGAAGACA CUGAUGAGGCCGUUAGGCCGAA AGGAAUGC | 4254 |
| 4010 | CAUUCCUU U GUCUUCAA | 478 | UUGAAGAC CUGAUGAGGCCGUUAGGCCGAA AAGGAAUG | 4255 |
| 4013 | UCCUUUGU C UUCAAACU | 479 | AGUUUGAA CUGAUGAGGCCGUUAGGCCGAA ACAAAGGA | 4256 |
| 4015 | CUUUGUCU U CAAACUGU | 480 | ACAGUUUG CUGAUGAGGCCGUUAGGCCGAA AGACAAAG | 4257 |
| 4016 | UUUGUCUU C AAACUGUG | 481 | CACAGUUU CUGAUGAGGCCGUUAGGCCGAA AAGACAAA | 4258 |
| 4031 | UGAAGCAU U UACAGAAA | 482 | UUUCUGUA CUGAUGAGGCCGUUAGGCCGAA AUGCUUCA | 4259 |
| 4032 | GAAGCAUU U ACAGAAAC | 483 | GUUUCUGU CUGAUGAGGCCGUUAGGCCGAA AAUGCUUC | 4260 |
| 4033 | AAGCAUUU A CAGAAACG | 484 | CGUUUCUG CUGAUGAGGCCGUUAGGCCGAA AAAUGCUU | 4261 |
| 4045 | AAACGCAU C CAGCAAGA | 485 | UCUUGCUG CUGAUGAGGCCGUUAGGCCGAA AUGCGUUU | 4262 |
| 4056 | GCAAGAAU A UUGUCCCU | 486 | AGGGACAA CUGAUGAGGCCGUUAGGCCGAA AUUCUUGC | 4263 |
| 4058 | AAGAAUAU U GUCCCUUU | 487 | AAAGGGAC CUGAUGAGGCCGUUAGGCCGAA AUAUUCUU | 4264 |
| 4061 | AAUAUUGU C CCUUUGAG | 488 | CUCAAAGG CUGAUGAGGCCGUUAGGCCGAA ACAAUAUU | 4265 |
| 4065 | UUGUCCCU U UGAGCAGA | 489 | UCUGCUCA CUGAUGAGGCCGUUAGGCCGAA AGGGACAA | 4266 |
| 4066 | UGUCCCUU U GAGCAGAA | 490 | UUCUGCUC CUGAUGAGGCCGUUAGGCCGAA AAGGGACA | 4267 |
| 4077 | GCAGAAAU U UAUCUUUC | 491 | GAAAGAUA CUGAUGAGGCCGUUAGGCCGAA AUUUCUGC | 4268 |
| 4078 | CAGAAAUU U AUCUUUCA | 492 | UGAAAGAU CUGAUGAGGCCGUUAGGCCGAA AAUUUCUG | 4269 |
| 4079 | AGAAAUUU A UCUUUCAA | 493 | UUGAAAGA CUGAUGAGGCCGUUAGGCCGAA AAAUUUCU | 4270 |
| 4081 | AAAUUUAU C UUUCAAAG | 494 | CUUUGAAA CUGAUGAGGCCGUUAGGCCGAA AUAAAUUU | 4271 |
| 4083 | AUUUAUCU U UCAAAGAG | 495 | CUCUUUGA CUGAUGAGGCCGUUAGGCCGAA AGAUAAAU | 4272 |
| 4084 | UUUAUCUU U CAAAGAGG | 496 | CCUCUUUG CUGAUGAGGCCGUUAGGCCGAA AAGAUAAA | 4273 |
| 4085 | UUAUCUUU C AAAGAGGU | 497 | ACCUCUUU CUGAUGAGGCCGUUAGGCCGAA AAAGAUAA | 4274 |
| 4094 | AAAGAGGU A UAUUUGAA | 498 | UUCAAAUA CUGAUGAGGCCGUUAGGCCGAA ACCUCUUU | 4275 |
| 4096 | AGAGGUAU A UUUGAAAA | 499 | UUUUCAAA CUGAUGAGGCCGUUAGGCCGAA AUACCUCU | 4276 |
| 4098 | AGGUAUAU U UGAAAAAA | 500 | UUUUUUCA CUGAUGAGGCCGUUAGGCCGAA AUAUACCU | 4277 |
| 4099 | GGUAUAUU U GAAAAAAA | 501 | UUUUUUUC CUGAUGAGGCCGUUAGGCCGAA AAUAUACC | 4278 |
| 4118 | AAAAAAGU A UAUGUGAG | 502 | CUCACAUA CUGAUGAGGCCGUUAGGCCGAA ACUUUUUU | 4279 |
| 4120 | AAAAGUAU A UGUGAGGA | 503 | UCCUCACA CUGAUGAGGCCGUUAGGCCGAA AUACUUUU | 4280 |
| 4130 | GUGAGGAU U UUUAUUGA | 504 | UCAAUAAA CUGAUGAGGCCGUUAGGCCGAA AUCCUCAC | 4281 |
| 4131 | UGAGGAUU U UUAUUGAU | 505 | AUCAAUAA CUGAUGAGGCCGUUAGGCCGAA AAUCCUCA | 4282 |
| 4132 | GAGGAUUU U UAUUGAUU | 506 | AAUCAAUA CUGAUGAGGCCGUUAGGCCGAA AAAUCCUC | 4283 |
| 4133 | AGGAUUUU U AUUGAUUG | 507 | CAAUCAAU CUGAUGAGGCCGUUAGGCCGAA AAAAUCCU | 4284 |
| 4134 | GGAUUUUU A UUGAUUGG | 508 | CCAAUCAA CUGAUGAGGCCGUUAGGCCGAA AAAAAUCC | 4285 |
| 4136 | AUUUUUAU U GAUUGGGG | 509 | CCCCAAUC CUGAUGAGGCCGUUAGGCCGAA AUAAAAAU | 4286 |
| 4140 | UUAUUGAU U GGGGAUCU | 510 | AGAUCCCC CUGAUGAGGCCGUUAGGCCGAA AUCAAUAA | 4287 |
| 4147 | UUGGGGAU C UUGGAGUU | 511 | AACUCCAA CUGAUGAGGCCGUUAGGCCGAA AUCCCCAA | 4288 |
| 4149 | GGGGAUCU U GGAGUUUU | 512 | AAAACUCC CUGAUGAGGCCGUUAGGCCGAA AGAUCCCC | 4289 |
| 4155 | CUUGGAGU U UUUCAUUG | 513 | CAAUGAAA CUGAUGAGGCCGUUAGGCCGAA ACUCCAAG | 4290 |
| 4156 | UUGGAGUU U UUCAUUGU | 514 | ACAAUGAA CUGAUGAGGCCGUUAGGCCGAA AACUCCAA | 4291 |
| 4157 | UGGAGUUU U UCAUUGUC | 515 | GACAAUGA CUGAUGAGGCCGUUAGGCCGAA AAACUCCA | 4292 |
| 4158 | GGAGUUUU U CAUUGUCG | 516 | CGACAAUG CUGAUGAGGCCGUUAGGCCGAA AAAACUCC | 4293 |
| 4159 | GAGUUUUU C AUUGUCGC | 517 | GCGACAAU CUGAUGAGGCCGUUAGGCCGAA AAAAACUC | 4294 |
| 4162 | UUUUUCAU U GUCGCUAU | 518 | AUAGCGAC CUGAUGAGGCCGUUAGGCCGAA AUGAAAAA | 4295 |
| 4165 | UUCAUUGU C GCUAUUGA | 519 | UCAAUAGC CUGAUGAGGCCGUUAGGCCGAA ACAAUGAA | 4296 |
| 4169 | UUGUCGCU A UUGAUUUU | 520 | AAAAUCAA CUGAUGAGGCCGUUAGGCCGAA AGCGACAA | 4297 |
| 4171 | GUCGCUAU U GAUUUUUA | 521 | UAAAAAUC CUGAUGAGGCCGUUAGGCCGAA AUAGCGAC | 4298 |
| 4175 | CUAUUGAU U UUUACUUC | 522 | GAAGUAAA CUGAUGAGGCCGUUAGGCCGAA AUCAAUAG | 4299 |
| 4176 | UAUUGAUU U UUACUUCA | 523 | UGAAGUAA CUGAUGAGGCCGUUAGGCCGAA AAUCAAUA | 4300 |
| 4177 | AUUGAUUU U UACUUCAA | 524 | UUGAAGUA CUGAUGAGGCCGUUAGGCCGAA AAAUCAAU | 4301 |
| 4178 | UUGAUUUU U ACUUCAAU | 525 | AUUGAAGU CUGAUGAGGCCGUUAGGCCGAA AAAAUCAA | 4302 |
| 4179 | UGAUUUUU A CUUCAAUG | 526 | CAUUGAAG CUGAUGAGGCCGUUAGGCCGAA AAAAAUCA | 4303 |
| 4182 | UUUUUACU U CAAUGGGC | 527 | CCCCAUUG CUGAUGAGGCCGUUAGGCCGAA AGUAAAAA | 4304 |
| 4183 | UUUUACUU C AAUGGGCU | 528 | AGCCCAUU CUGAUGAGGCCGUUAGGCCGAA AAGUAAAA | 4305 |
| 4192 | AAUGGGCU C UUCCAACA | 529 | UGUUGGAA CUGAUGAGGCCGUUAGGCCGAA AGCCCAUU | 4306 |
| 4194 | UGGGCUCU U CCAACAAG | 530 | CUUGUUGG CUGAUGAGGCCGUUAGGCCGAA AGAGCCCA | 4307 |
| 4195 | GGGCUCUU C CAACAAGG | 531 | CCUUGUUG CUGAUGAGGCCGUUAGGCCGAA AAGAGCCC | 4308 |
| 4212 | AAGAAGCU U GCUGGUAG | 532 | CUACCAGC CUGAUGAGGCCGUUAGGCCGAA AGCUUCUU | 4309 |
| 4219 | UUGCUGGU A GCACUUGC | 533 | GCAAGUGC CUGAUGAGGCCGUUAGGCCGAA ACCAGCAA | 4310 |
| 4225 | GUAGCACU U GCUACCCU | 534 | AGGGUAGC CUGAUCAGGCCGUUAGGCCGAA ACUCCUAC | 4311 |
| 4229 | CACUUGCU A CCCUGAGU | 535 | ACUCAGGG CUGAUGAGGCCGUUAGGCCGAA AGCAAGUG | 4312 |
| 4238 | CCCUGAGU U CAUCCAGG | 536 | CCUGGAUG CUGAUGAGGCCGUUAGGCCGAA ACUCAGGG | 4313 |
| 4239 | CCUGAGUU C AUCCAGGC | 537 | GCCUGGAU CUGAUGAGGCCGUUAGGCCGAA AACUCAGG | 4314 |
| 4242 | GAGUUCAU C CAGGCCCA | 538 | UGGGCCUG CUGAUGAGGCCGUUAGGCCGAA AUGAACUC | 4315 |
| 4280 | CCACAAGU C UUCCAGAG | 539 | CUCUGGAA CUGAUGAGGCCGUUAGGCCGAA ACUUGUGG | 4316 |
| 4282 | ACAAGUCU U CCAGAGGA | 540 | UCCUCUGG CUGAUGAGGCCGUUAGGCCGAA AGACUUGU | 4317 |
| 4283 | CAAGUCUU C CAGAGGAU | 541 | AUCCUCUG CUGAUGAGGCCGUUAGGCCGAA AAGACUUG | 4318 |
| 4295 | AGGAUGCU U GAUUCCAG | 542 | CUGGAAUC CUGAUGAGGCCGUUAGGCCGAA AGCAUCCU | 4319 |
| 4299 | UGCUUGAU U CCAGUGGU | 543 | ACCACUGG CUGAUGAGGCCGUUAGGCCGAA AUCAAGCA | 4320 |
| 4300 | GCUUGAUU C CAGUGGUU | 544 | AACCACUG CUGAUGAGGCCGUUAGGCCGAA AAUCAAGC | 4321 |
| 4308 | CCAGUGGU U CUGCUUCA | 545 | UGAAGCAG CUGAUGAGGCCGUUAGGCCGAA ACCACUGG | 4322 |
| 4309 | CAGUGGUU C UGCUUCAA | 546 | UUGAAGCA CUGAUGAGGCCGUUAGGCCGAA AACCACUG | 4323 |
| 4314 | GUUCUGCU U CAAGGCUU | 547 | AAGCCUUG CUGAUGAGGCCGUUAGGCCGAA AGCAGAAC | 4324 |
| 4315 | UUCUGCUU C AAGGCUUC | 548 | GAAGCCUU CUGAUGAGGCCGUUAGGCCGAA AAGCAGAA | 4325 |
| 4322 | UCAAGGCU U CCACUGCA | 549 | UGCAGUGG CUGAUGAGGCCGUUAGGCCGAA AGCCUUGA | 4326 |
| 4323 | CAAGGCUU C CACUGCAA | 550 | UUGCAGUG CUGAUGAGGCCGUUAGGCCGAA AAGCCUUG | 4327 |
| 4338 | AAAACACU A AAGAUCCA | 551 | UGGAUCUU CUGAUGAGGCCGUUAGGCCGAA AGUGUUUU | 4328 |
| 4344 | CUAAAGAU C CAAGAAGG | 552 | CCUUCUUG CUGAUGAGGCCGUUAGGCCGAA AUCUUUAG | 4329 |
| 4356 | GAAGGCCU U CAUGGCCC | 553 | GGGCCAUG CUGAUGAGGCCGUUAGGCCGAA AGGCCUUC | 4330 |
| 4357 | AAGGCCUU C AUGGCCCC | 554 | GGGGCCAU CUGAUGAGGCCGUUAGGCCGAA AAGGCCUU | 4331 |
| 4378 | GGCCGGAU C GGUACUGU | 555 | ACAGUACC CUGAUGAGGCCGUUAGGCCGAA AUCCGGCC | 4332 |
| 4382 | GGAUCGGU A CUGUAUCA | 556 | UGAUACAG CUGAUGAGGCCGUUAGGCCGAA ACCGAUCC | 4333 |
| 4387 | GGUACUGU A UCAAGUCA | 557 | UGACUUGA CUGAUGAGGCCGUUAGGCCGAA ACAGUACC | 4334 |
| 4389 | UACUGUAU C AAGUCAUG | 558 | CAUGACUU CUGAUGAGGCCGUUAGGCCGAA AUACAGUA | 4335 |
| 4394 | UAUCAAGU C AUGGCAGG | 559 | CCUGCCAU CUGAUGAGGCCGUUAGGCCGAA ACUUGAUA | 4336 |
| 4404 | UGGCAGGU A CAGUAGGA | 560 | UCCUACUG CUGAUGAGGCCGUUAGGCCGAA ACCUGCCA | 4337 |
| 4409 | GGUACAGU A GGAUAAGC | 561 | GCUUAUCC CUGAUGAGGCCGUUAGGCCGAA ACUGUACC | 4338 |
| 4414 | AGUAGGAU A AGCCACUC | 562 | GAGUGGCU CUGAUGAGGCCGUUAGGCCGAA AUCCUACU | 4339 |
| 4422 | AAGCCACU C UGUCCCUU | 563 | AAGGGACA CUGAUGAGGCCGUUAGGCCGAA AGUGGCUU | 4340 |
| 4426 | CACUCUGU C CCUUCCUG | 564 | CAGGAAGG CUGAUGAGGCCGUUAGGCCGAA ACAGAGUG | 4341 |
| 4430 | CUGUCCCU U CCUGGGCA | 565 | UGCCCAGU CUGAUGAGGCCGUUAGGCCGAA AGGGACAG | 4342 |
| 4431 | UGUCCCUU C CUGGGCAA | 566 | UUGCCCAG CUGAUGAGGCCGUUAGGCCGAA AAGGGACA | 4343 |
| 4462 | GGAUGAAU U CUUCCUUA | 567 | UAAGGAAG CUGAUGAGGCCGUUAGGCCGAA AUUCAUCC | 4344 |
| 4463 | GAUGAAUU C UUCCUUAG | 568 | CUAAGGAA CUGAUGAGGCCGUUAGGCCGAA AAUUCAUC | 4345 |
| 4465 | UGAAUUCU U CCUUAGAC | 569 | GUCUAAGG CUGAUGAGGCCGUUAGGCCGAA AGAAUUCA | 4346 |
| 4466 | GAAUUCUU C CUUAGACU | 570 | AGUCUAAG CUGAUGAGGCCGUUAGGCCGAA AAGAAUUC | 4347 |
| 4469 | UUCUUCCU U AGACUUAC | 571 | GUAAGUCU CUGAUGAGGCCGUUAGGCCGAA AGGAAGAA | 4348 |
| 4470 | UCUUCCUU A GACUUACU | 572 | AGUAAGUC CUGAUGAGGCCGUUAGGCCGAA AAGGAAGA | 4349 |
| 4475 | CUUAGACU U ACUUUUGU | 573 | ACAAAAGU CUGAUGAGGCCGUUAGGCCGAA AGUCUAAG | 4350 |
| 4476 | UUAGACUU A CUUUUGUA | 574 | UACAAAAG CUGAUGAGGCCGUUAGGCCGAA AAGUCUAA | 4351 |
| 4479 | GACUUACU U UUGUAAAA | 575 | UUUUACAA CUGAUGAGGCCGUUAGGCCGAA AGUAAGUC | 4352 |
| 4480 | ACUUACUU U UGUAAAAA | 576 | UUUUUACA CUGAUGAGGCCGUUAGGCCGAA AAGUAAGU | 4353 |
| 4481 | CUUACUUU U GUAAAAAU | 577 | AUUUUUAC CUGAUGAGGCCGUUAGGCCGAA AAAGUAAG | 4354 |
| 4484 | ACUUUUGU A AAAAUGUC | 578 | GACAUUUU CUGAUGAGGCCGUUAGGCCGAA ACAAAAGU | 4355 |
| 4492 | AAAAAUGU C CCCACGGU | 579 | ACCGUGGG CUGAUGAGGCCGUUAGGCCGAA ACAUUUUU | 4356 |
| 4501 | CCCACGGU A CUUACUCC | 580 | GGAGUAAG CUGAUGAGGCCGUUAGGCCGAA ACCGUGGG | 4357 |
| 4504 | ACGGUACU U ACUCCCCA | 581 | UGGGGAGU CUGAUGAGGCCGUUAGGCCGAA AGUACCGU | 4358 |
| 4505 | CGGUACUU A CUCCCCAC | 582 | GUGGGGAG CUGAUGAGGCCGUUAGGCCGAA AAGUACCG | 4359 |
| 4508 | UACUUACU C CCCACUGA | 583 | UCAGUGGG CUGAUGAGGCCGUUAGGCCGAA AGUAAGUA | 4360 |
| 4529 | CCAGUGGU U UCCAGUCA | 584 | UGACUGGA CUGAUGAGGCCGUUAGGCCGAA ACCACUGG | 4361 |
| 4530 | CAGUGGUU U CCAGUCAU | 585 | AUGACUGG CUGAUGAGGCCGUUAGGCCGAA AACCACUG | 4362 |
| 4531 | AGUGGUUU C CAGUCAUG | 586 | CAUGACUG CUGAUGAGGCCGUUAGGCCGAA AAACCACU | 4363 |
| 4536 | UUUCCAGU C AUGAGCGU | 587 | ACGCUCAU CUGAUGAGGCCGUUAGGCCGAA ACUGGAAA | 4364 |
| 4545 | AUGAGCGU U AGACUGAC | 588 | GUCAGUCU CUGAUGAGGCCGUUAGGCCGAA ACGCUCAU | 4365 |
| 4546 | UGAGCGUU A GACUGACU | 589 | AGUCAGUC CUGAUGAGGCCGUUAGGCCGAA AACGCUCA | 4366 |
| 4555 | GACUGACU U GUUUGUCU | 590 | AGACAAAC CUGAUGAGGCCGUUAGGCCGAA AGUCAGUC | 4367 |
| 4558 | UGACUUGU U UGUCUUCC | 591 | GGAAGACA CUGAUGAGGCCGUUAGGCCGAA ACAAGUCA | 4368 |
| 4559 | GACUUGUU U GUCUUCCA | 592 | UGGAAGAC CUGAUGAGGCCGUUAGGCCGAA AACAAGUC | 4369 |
| 4562 | UUGUUUGU C UUCCAUUC | 593 | GAAUGGAA CUGAUGAGGCCGUUAGGCCGAA ACAAACAA | 4370 |
| 4564 | GUUUGUCU U CCAUUCCA | 594 | UGGAAUGG CUGAUGAGGCCGUUAGGCCGAA AGACAAAC | 4371 |
| 4565 | UUUGUCUU C CAUUCCAU | 595 | AUGGAAUG CUGAUGAGGCCGUUAGGCCGAA AAGACAAA | 4372 |
| 4569 | UCUUCCAU U CCAUUGUU | 596 | AACAAUGG CUGAUGAGGCCGUUAGGCCGAA AUGGAAGA | 4373 |
| 4570 | CUUCCAUU C CAUUGUUU | 597 | AAACAAUG CUGAUGAGGCCGUUAGGCCGAA AAUGGAAG | 4374 |
| 4574 | CAUUCCAU U GUUUUGAA | 598 | UUCAAAAC CUGAUGAGGCCGUUAGGCCGAA AUGGAAUG | 4375 |
| 4577 | UCCAUUGU U UUGAAACU | 599 | AGUUUCAA CUGAUGAGGCCGUUAGGCCGAA ACAAUGGA | 4376 |
| 4578 | CCAUUGUU U UGAAACUC | 600 | GAGUUUCA CUGAUGAGGCCGUUAGGCCGAA AACAAUGG | 4377 |
| 4579 | CAUUGUUU U GAAACUCA | 601 | UGAGUUUC CUGAUGAGGCCGUUAGGCCGAA AAACAAUG | 4378 |
| 4586 | UUGAAACU C AGUAUGCC | 602 | GGCAUACU CUGAUGAGGCCGUUAGGCCGAA AGUUUCAA | 4379 |
| 4590 | AACUCAGU A UGCCGCCC | 603 | GGGCGGCA CUGAUGAGGCCGUUAGGCCGAA ACUGAGUU | 4380 |
| 4603 | GCCCCUGU C UUGCUGUC | 604 | GACAGCAA CUGAUGAGGCCGUUAGGCCGAA ACAGGGGC | 4381 |
| 4605 | CCCUGUCU U GCUGUCAU | 605 | AUGACAGC CUGAUGAGGCCGUUAGGCCGAA AGACAGGG | 4382 |
| 4611 | CUUGCUGU C AUGAPAUC | 606 | GAUUUCAU CUGAUGAGGCCGUUAGGCCGAA ACAGCAAG | 4383 |
| 4619 | CAUGAAAU C AGCAAGAG | 607 | CUCUUGCU CUGAUGAGGCCGUUAGGCCGAA AUUUCAUG | 4384 |
| 4640 | UGACACAU C AAAUAAUA | 608 | UAUUAUUU CUGAUGAGGCCGUUAGGCCGAA AUGUGUCA | 4385 |
| 4645 | CAUCAAAU A AUAACUCG | 609 | CGAGUUAU CUGAUGAGGCCGUUAGGCCGAA AUUUGAUG | 4386 |
| 4648 | CAAAUAAU A ACUCGGAU | 610 | AUCCGAGU CUGAUGAGGCCGUUAGGCCGAA AUUAUUUG | 4387 |
| 4652 | UAAUAACU C GGAUUCCA | 611 | UGGAAUCC CUGAUGAGGCCGUUAGGCCGAA AGUUAUUA | 4388 |
| 4657 | ACUCGGAU U CCAGCCCA | 612 | UGGGCUGG CUGAUGAGGCCGUUAGGCCGAA AUCCGAGU | 4389 |
| 4658 | CUCGGAUU C CAGCCCAC | 613 | GUGGGCUG CUGAUGAGGCCGUUAGGCCGAA AAUCCGAG | 4390 |
| 4669 | GCCCACAU U GGAUUCAU | 614 | AUGAAUCC CUGAUGAGGCCGUUAGGCCGAA AUGUGGGC | 4391 |
| 4674 | CAUUGGAU U CAUCAGCA | 615 | UGCUGAUG CUGAUGAGGCCGUUAGGCCGAA AUCCAAUG | 4392 |
| 4675 | AUUGGAUU C AUCAGCAU | 616 | AUGCUGAU CUGAUGAGGCCGUUAGGCCGAA AAUCCAAU | 4393 |
| 4678 | GGAUUCAU C AGCAUUUG | 617 | CAAAUGCU CUGAUGAGGCCGUUAGGCCGAA AUGAAUCC | 4394 |
| 4684 | AUCAGCAU U UGGACCAA | 618 | CUGGUCCA CUGAUGAGGCCGUUAGGCCGAA AUGCUGAU | 4395 |
| 4685 | UCAGCAUU U GGACCAAU | 619 | AUUGGUCC CUGAUGAGGCCGUUAGGCCGAA AAUGCUGA | 4396 |
| 4694 | GGACCAAU A GCCCACAG | 620 | CUGUGGGC CUGAUGAGGCCGUUAGGCCGAA AUUGGUCC | 4397 |
| 4718 | UGUGGAAU A CCUAAGGA | 621 | UCCUUAGG CUGAUGAGGCCGUUAGGCCGAA AUUCCACA | 4398 |
| 4722 | GAAUACCU A AGGAUAAC | 622 | GUUAUCCU CUGAUGAGGCCGUUAGGCCGAA AGGUAUUC | 4399 |
| 4728 | CUAAGGAU A ACACCGCU | 623 | AGCGGUGU CUGAUGAGGCCGUUAGGCCGAA AUCCUUAG | 4400 |
| 4737 | ACACCGCU U UUGUUCUC | 624 | GAGAACAA CUGAUGAGGCCGUUAGGCCGAA AGCGGUGU | 4401 |
| 4738 | CACCGCUU U UGUUCUCG | 625 | CGAGAACA CUGAUGAGGCCGUUAGGCCGAA AAGCGGUG | 4402 |
| 4739 | ACCGCUUU U GUUCUCGC | 626 | GCGAGAAC CUGAUGAGGCCGUUAGGCCGAA AAAGCGGU | 4403 |
| 4742 | GCUUUUGU U CUCGCAAA | 627 | UUUGCGAG CUGAUGAGGCCGUUAGGCCGAA ACAAAAGC | 4404 |
| 4743 | CUUUUGUU C UCGCAAAA | 628 | UUUUGCGA CUGAUGAGGCCGUUAGGCCGAA AACAAAAG | 4405 |
| 4745 | UUUGUUCU C GCAAAAAC | 629 | GUUUUUGC CUGAUGAGGCCGUUAGGCCGAA AGAACAAA | 4406 |
| 4756 | AAAAACGU A UCUCCUAA | 630 | UUAGGAGA CUGAUGAGGCCGUUAGGCCGAA ACGUUUUU | 4407 |
| 4758 | AAACGUAU C UCCUAAUU | 631 | AAUUAGGA CUGAUGAGGCCGUUAGGCCGAA AUACGUUU | 4408 |
| 4760 | ACGUAUCU C CUAAUUUG | 632 | CAAAUUAG CUGAUGAGGCCGUUAGGCCGAA AGAUACGU | 4409 |
| 4763 | UAUCUCCU A AUUUGAGG | 633 | CCUCAAAU CUGAUGAGGCCGUUAGGCCGAA AGGAGAUA | 4410 |
| 4766 | CUCCUAAU U UGAGGCUC | 634 | GAGCCUCA CUGAUGAGGCCGUUAGGCCGAA AUUAGGAG | 4411 |
| 4767 | UCCUAAUU U GAGGCUCA | 635 | UGAGCCUC CUGAUGAGGCCGUUAGGCCGAA AAUUAGGA | 4412 |
| 4774 | UUGAGGCU C AGAUGAAA | 636 | UUUCAUCU CUGAUGAGGCCGUUAGGCCGAA AGCCUCAA | 4413 |
| 4788 | AAAUGCAU C AGGUCCUU | 637 | AAGGACCU CUGAUGAGGCCGUUAGGCCGAA AUGCAUUU | 4414 |
| 4793 | CAUCAGGU C CUUUGGGG | 638 | CCCCAAAG CUGAUGAGGCCGUUAGGCCGAA ACCUGAUG | 4415 |
| 4796 | CAGGUCCU U UGGGGCAU | 639 | AUGCCCCA CUGAUGAGGCCGUUAGGCCGAA AGGACCUG | 4416 |
| 4797 | AGGUCCUU U GGGGCAUA | 640 | UAUGCCCC CUGAUGAGGCCGUUAGGCCGAA AAGGACCU | 4417 |
| 4805 | UGGGGCAU A GAUCAGAA | 641 | UUCUGAUC CUGAUGAGGCCGUUAGGCCGAA AUGCCCCA | 4418 |
| 4809 | GCAUAGAU C AGAAGACU | 642 | AGUCUUCU CUGAUGAGGCCGUUAGGCCGAA AUCUAUGC | 4419 |
| 4818 | AGAAGACU A CAAAAAUG | 643 | CAUUUUUG CUGAUGAGGCCGUUAGGCCGAA AGUCUUCU | 4420 |
| 4835 | AAGCUGCU C UGAAAUCU | 644 | AGAUUUCA CUGAUGAGGCCGUUAGGCCGAA AGCAGCUU | 4421 |
| 4842 | UCUGAAAU C UCCUUUAG | 645 | CUAAAGGA CUGAUGAGGCCGUUAGGCCGAA AUUUCAGA | 4422 |
| 4844 | UGAAAUCU C CUUUAGCC | 646 | GGCUAAAG CUGAUGAGGCCGUUAGGCCGAA AGAUUUCA | 4423 |
| 4847 | AAUCUCCU U UAGCCAUC | 647 | GAUGGCUA CUGAUGAGGCCGUUAGGCCGAA AGGAGAUU | 4424 |
| 4848 | AUCUCCUU U AGCCAUCA | 648 | UGAUGGCU CUGAUGAGGCCGUUAGGCCGAA AAGGAGAU | 4425 |
| 4849 | UCUCCUUU A GCCAUCAC | 649 | GUGAUGGC CUGAUGAGGCCGUUAGGCCGAA AAAGGAGA | 4426 |
| 4855 | UUAGCCAU C ACCCCAAC | 650 | GUUGGGGU CUGAUGAGGCCGUUAGGCCGAA AUGGCUAA | 4427 |
| 4874 | CCCAAAAU U AGUUUGUG | 651 | CACAAACU CUGAUGAGGCCGUUAGGCCGAA AUUUUGGG | 4428 |
| 4875 | CCAAAAUU A GUUUGUGU | 652 | ACACAAAC CUGAUGAGGCCGUUAGGCCGAA AAUUUUGG | 4429 |
| 4878 | AAAUUAGU U UGUGUUAC | 653 | GUAACACA CUGAUGAGGCCGUUAGGCCGAA ACUAAUUU | 4430 |
| 4879 | AAUUAGUU U GUGUUACU | 654 | AGUAACAC CUGAUGAGGCCGUUAGGCCGAA AACUAAUU | 4431 |
| 4884 | GUUUGUGU U ACUUAUGG | 655 | CCAUAAGU CUGAUGAGGCCGUUAGGCCGAA ACACAAAC | 4432 |
| 4885 | UUUGUGUU A CUUAUGGA | 656 | UCCAUAAG CUGAUGAGGCCGUUAGGCCGAA AACACAAA | 4433 |
| 4888 | GUGUUACU U AUGGAAGA | 657 | UCUUCCAU CUGAUGAGGCCGUUAGGCCGAA AGUAACAC | 4434 |
| 4889 | UGUUACUU A UGGAAGAU | 658 | AUCUUCCA CUGAUGAGGCCGUUAGGCCGAA AAGUAACA | 4435 |
| 4898 | UGGAAGAU A GUUUUCUC | 659 | GAGAAAAC CUGAUGAGGCCGUUAGGCCGAA AUCUUCCA | 4436 |
| 4901 | AAGAUAGU U UUCUCCUU | 660 | AAGGAGAA CUGAUGAGGCCGUUAGGCCGAA ACUAUCUU | 4437 |
| 4902 | AGAUAGUU U UCUCCUUU | 661 | AAAGGAGA CUGAUGAGGCCGUUAGGCCGAA AACUAUCU | 4438 |
| 4903 | GAUAGUUU U CUCCUUUU | 662 | AAAAGGAG CUGAUGAGGCCGUUAGGCCGAA AAACUAUC | 4439 |
| 4904 | AUAGUUUU C UCCUUUUA | 663 | UAAAAGGA CUGAUGAGGCCGUUAGGCCGAA AAAACUAU | 4440 |
| 4906 | AGUUUUCU C CUUUUACU | 664 | AGUAAAAG CUGAUGAGGCCGUUAGGCCGAA AGAAAACU | 4441 |
| 4909 | UUUCUCCU U UUACUUCA | 665 | UGAAGUAA CUGAUGAGGCCGUUAGGCCGAA AGGAGAAA | 4442 |
| 4910 | UUCUCCUU U UACUUCAC | 666 | GUGAAGUA CUGAUGAGGCCGUUAGGCCGAA AAGGAGAA | 4443 |
| 4911 | UCUCCUUU U ACUUCACU | 667 | AGUGAAGU CUGAUGAGGCCGUUAGGCCGAA AAAGGAGA | 4444 |
| 4912 | CUCCUUUU A CUUCACUU | 668 | AAGUGAAG CUGAUGAGGCCGUUAGGCCGAA AAAAGGAG | 4445 |
| 4915 | CUUUUACU U CACUUCAA | 669 | UUGAAGUG CUGAUGAGGCCGUUAGGCCGAA AGUAAAAG | 4446 |
| 4916 | UUUUACUU C ACUUCAAA | 670 | UUUGAAGU CUGAUGAGGCCGUUAGGCCGAA AAGUAAAA | 4447 |
| 4920 | ACUUCACU U CAAAAGCU | 671 | AGCUUUUG CUGAUGAGGCCGUUAGGCCGAA AGUGAAGU | 4448 |
| 4921 | CUUCACUU C AAAAGCUU | 672 | AAGCUUUU CUGAUGAGGCCGUUAGGCCGAA AAGUGAAG | 4449 |
| 4929 | CAAAAGCU U UUUACUCA | 673 | UGAGUAAA CUGAUGAGGCCGUUAGGCCGAA AGCUUUUG | 4450 |
| 4930 | AAAAGCUU U UUACUCAA | 674 | UUGAGUAA CUGAUGAGGCCGUUAGGCCGAA AAGCUUUU | 4451 |
| 4931 | AAAGCUUU U UACUCAAA | 675 | UUUGAGUA CUGAUGAGGCCGUUAGGCCGAA AAAGCUUU | 4452 |
| 4932 | AAGCUUUU U ACUCAAAG | 676 | CUUUGAGU CUGAUGAGGCCGUUAGGCCGAA AAAAGCUU | 4453 |
| 4933 | AGCUUUUU A CUCAAAGA | 677 | UCUUUGAG CUGAUGAGGCCGUUAGGCCGAA AAAAAGCU | 4454 |
| 4936 | UUUUUACU C AAAGAGUA | 678 | UACUCUUU CUGAUGAGGCCGUUAGGCCGAA ACUAAAAA | 4455 |
| 4944 | CAAAGAGU A UAUGUUCC | 679 | GGAACAUA CUGAUGAGGCCGUUAGGCCGAA ACUCUUUG | 4456 |
| 4946 | AAGAGUAU A UGUUCCCU | 680 | AGGGAACA CUGAUGAGGCCGUUAGGCCGAA AUACUCUU | 4457 |
| 4950 | GUAUAUGU U CCCUCCAG | 681 | CUGGAGGG CUGAUGAGGCCGUUAGGCCGAA ACAUAUAC | 4458 |
| 4951 | UAUAUGUU C CCUCCAGG | 682 | CCUGGAGG CUGAUGAGGCCGUUAGGCCGAA AACAUAUA | 4459 |
| 4955 | UGUUCCCU C CAGGUCAG | 683 | CUGACCUG CUGAUGAGGCCGUUAGGCCGAA AGGGAACA | 4460 |
| 4961 | CUCCAGGU C AGCUGCCC | 684 | GGGCAGCU CUGAUGAGGCCGUUAGGCCGAA ACCUGGAG | 4461 |
| 4981 | AACCCCCU C CUUACGCU | 685 | AGCGUAAG CUGAUGAGGCCGUUAGGCCGAA AGGGGGUU | 4462 |
| 4984 | CCCCUCCU U ACGCUUUG | 686 | CAAAGCGU CUGAUGAGGCCGUUAGGCCGAA AGGAGGGG | 4463 |
| 4985 | CCCUCCUU A CGCUUUGU | 687 | ACAAAGCG CUGAUGAGGCCGUUAGGCCGAA AAGGAGGG | 4464 |
| 4990 | CUUACGCU U UGUCACAC | 688 | GUGUGACA CUGAUGAGGCCGUUAGGCCGAA AGCGUAAG | 4465 |
| 4991 | UUACGCUU U GUCACACA | 689 | UGUGUGAC CUGAUGAGGCCGUUAGGCCGAA AAGCGUAA | 4466 |
| 4994 | CGCUUUGU C ACACAAAA | 690 | UUUUGUGU CUGAUGAGGCCGUUAGGCCGAA ACAAAGCG | 4467 |
| 5008 | AAAAGUGU C UCUGCCUU | 691 | AAGGCAGA CUGAUGAGGCCGUUAGGCCGAA ACACUUUU | 4468 |
| 5010 | AAGUGUCU C UGCCUUGA | 692 | UCAAGGCA CUGAUGAGGCCGUUAGGCCGAA AGACACUU | 4469 |
| 5016 | CUCUGCCU U GAGUCAUC | 693 | GAUGACUC CUGAUGAGGCCGUUAGGCCGAA AGGCAGAG | 4470 |
| 5021 | CCUUGAGU C AUCUAUUC | 694 | GAAUAGAU CUGAUGAGGCCGUUAGGCCGAA ACUCAAGG | 4471 |
| 5024 | UGAGUCAU C UAUUCAAG | 695 | CUUGAAUA CUGAUGAGGCCGUUAGGCCGAA AUGACUCA | 4472 |
| 5026 | AGUCAUCU A UUCAAGCA | 696 | UGCUUGAA CUGAUGAGGCCGUUAGGCCGAA AGAUGACU | 4473 |
| 5028 | UCAUCUAU U CAAGCACU | 697 | AGUGCUUG CUGAUGAGGCCGUUAGGCCGAA AUAGAUGA | 4474 |
| 5029 | CAUCUAUU C AAGCACUU | 698 | AAGUGCUU CUGAUGAGGCCGUUAGGCCGAA AAUAGAUG | 4475 |
| 5037 | CAAGCACU U ACAGCUCU | 699 | AGAGCUGU CUGAUGAGGCCGUUAGGCCGAA AGUGCUUG | 4476 |
| 5038 | AAGCACUU A CAGCUCUG | 700 | CAGAGCUG CUGAUGAGGCCGUUAGGCCGAA AAGUGCUU | 4477 |
| 5044 | UUACAGCU C UGGCCACA | 701 | UGUGGCCA CUGAUGAGGCCGUUAGGCCGAA AGCUGUAA | 4478 |
| 5062 | CAGGGCAU U UUACAGGU | 702 | ACCUGUAA CUGAUGAGGCCGUUAGGCCGAA AUGCCCUG | 4479 |
| 5063 | AGGGCAUU U UACAGGUG | 703 | CACCUGUA CUGAUGAGGCCGUUAGGCCGAA AAUGCCCU | 4480 |
| 5064 | GGGCAUUU U ACAGGUGC | 704 | GCACCUGU CUGAUGAGGCCGUUAGGCCGAA AAAUGCCC | 4481 |
| 5065 | GGCAUUUU A CAGGUGCG | 705 | CGCACCUG CUGAUGAGGCCGUUAGGCCGAA AAAAUGCC | 4482 |
| 5083 | AUGACAGU A GCAUUAUG | 706 | CAUAAUGC CUGAUGAGGCCGUUAGGCCGAA ACUGUCAU | 4483 |
| 5088 | AGUAGCAU U AUGAGUAG | 707 | CUACUCAU CUGAUGAGGCCGUUAGGCCGAA AUGCUACU | 4484 |
| 5089 | GUAGCAUU A UGAGUAGU | 708 | ACUACUCA CUGAUGAGGCCGUUAGGCCGAA AAUGCUAC | 4485 |
| 5095 | UUAUGAGU A GUGUGAAU | 709 | AUUCACAC CUGAUGAGGCCGUUAGGCCGAA ACUCAUAA | 4486 |
| 5104 | GUGUGAAU U CAGGUAGU | 710 | ACUACCUG CUGAUGAGGCCGUUAGGCCGAA AUUCACAC | 4487 |
| 5105 | UGUGAAUU C AGGUAGUA | 711 | UACUACCU CUGAUGAGGCCGUUAGGCCGAA AAUUCACA | 4488 |
| 5110 | AUUCAGGU A GUAAAUAU | 712 | AUAUUUAC CUGAUGAGGCCGUUAGGCCGAA ACCUGAAU | 4489 |
| 5113 | CAGGUAGU A AAUAUGAA | 713 | UUCAUAUU CUGAUGAGGCCGUUAGGCCGAA ACUACCUG | 4490 |
| 5117 | UAGUAAAU A UGAAACUA | 714 | UAGUUUCA CUGAUGAGGCCGUUAGGCCGAA AUUUACUA | 4491 |
| 5125 | AUGAAACU A GGGUUUGA | 715 | UCAAACCC CUGAUGAGGCCGUUAGGCCGAA AGUUUCAU | 4492 |
| 5130 | ACUAGGGU U UGAAAUUG | 716 | CAAUUUCA CUGAUGAGGCCGUUAGGCCGAA ACCCUAGU | 4493 |
| 5131 | CUAGGGUU U GAAAUUGA | 717 | UCAAUUUC CUGAUGAGGCCGUUAGGCCGAA AACCCUAG | 4494 |
| 5137 | UUUGAAAU U GAUAAUGC | 718 | GCAUUAUC CUGAUGAGGCCGUUAGGCCGAA AUUUCAAA | 4495 |
| 5141 | AAAUUGAU A AUGCUUUC | 719 | GAAAGCAU CUGAUGAGGCCGUUAGGCCGAA AUCAAUUU | 4496 |
| 5147 | AUAAUGCU U UCACAACA | 720 | UGUUGUGA CUGAUGAGGCCGUUAGGCCGAA AGCAUUAU | 4497 |
| 5148 | UAAUGCUU U CACAACAU | 721 | AUGUUGUG CUGAUGAGGCCGUUAGGCCGAA AAGCAUUA | 4498 |
| 5149 | AAUGCUUU C ACAACAUU | 722 | AAUGUUGU CUGAUGAGGCCGUUAGGCCGAA AAAGCAUU | 4499 |
| 5157 | CACAACAU U UGCAGAUG | 723 | CAUCUGCA CUGAUGAGGCCGUUAGGCCGAA AUGUUGUG | 4500 |
| 5158 | ACAACAUU U GCAGAUGU | 724 | ACAUCUGC CUGAUGAGGCCGUUAGGCCGAA AAUGUUGU | 4501 |
| 5167 | GCAGAUGU U UUAGAAGG | 725 | CCUUCUAA CUGAUGAGGCCGUUAGGCCGAA ACAUCUGC | 4502 |
| 5168 | CAGAUGUU U UAGAAGGA | 726 | UCCUUCUA CUGAUGAGGCCGUUAGGCCGAA AACAUCUG | 4503 |
| 5169 | AGAUGUUU U AGAAGGAA | 727 | UUCCUUCU CUGAUGAGGCCGUUAGGCCGAA AAACAUCU | 4504 |
| 5170 | GAUGUUUU A GAAGGAAA | 728 | UUUCCUUC CUGAUGAGGCCGUUAGGCCGAA AAAACAUC | 4505 |
| 5184 | AAAAAAGU U CCUUCCUA | 729 | UAGGAAGG CUGAUGAGGCCGUUAGGCCGAA ACUUUUUU | 4506 |
| 5185 | AAAAAGUU C CUUCCUAA | 730 | UUAGGAAG CUGAUGAGGCCGUUAGGCCGAA AACUUUUU | 4507 |
| 5188 | AAGUUCCU U CCUAAAAU | 731 | AUUUUAGG CUGAUGAGGCCGUUAGGCCGAA AGGAACUU | 4508 |
| 5189 | AGUUCCUU C CUAAAAUA | 732 | UAUUUUAG CUGAUGAGGCCGUUAGGCCGAA AAGGAACU | 4509 |
| 5192 | UCCUUCCU A AAAUAAUU | 733 | AAUUAUUU CUGAUGAGGCCGUUAGGCCGAA AGGAAGGA | 4510 |
| 5197 | CCUAAAAU A AUUUCUCU | 734 | AGAGAAAU CUGAUGAGGCCGUUAGGCCGAA AUUUUAGG | 4511 |
| 5200 | AAAAUAAU U UCUCUACA | 735 | UGUAGAGA CUGAUGAGGCCGUUAGGCCGAA AUUAUUUU | 4512 |
| 5201 | AAAUAAUU U CUCUACAA | 736 | UUGUAGAG CUGAUGAGGCCGUUAGGCCGAA AAUUAUUU | 4513 |
| 5202 | AAUAAUUU C UCUACAAU | 737 | AUUGUAGA CUGAUGAGGCCGUUAGGCCGAA AAAUUAUU | 4514 |
| 5204 | UAAUUUCU C UACAAUUG | 738 | CAAUUGUA CUGAUGAGGCCGUUAGGCCGAA AGAAAUUA | 4515 |
| 5206 | AUUUCUCU A CAAUUGGA | 739 | UCCAAUUG CUGAUGAGGCCGUUAGGCCGAA AGAGAAAU | 4516 |
| 5211 | UCUACAAU U GGAAGAUU | 740 | AAUCUUCC CUGAUGAGGCCGUUAGGCCGAA AUUGUAGA | 4517 |
| 5219 | UGGAAGAU U GGAAGAUU | 741 | AAUCUUCC CUGAUGAGGCCGUUAGGCCGAA AUCUUCCA | 4518 |
| 5227 | UGGAAGAU U CAGCUAGU | 742 | ACUAGCUG CUGAUGAGGCCGUUAGGCCGAA AUCUUCCA | 4519 |
| 5228 | GGAAGAUU C AGCUAGUU | 743 | AACUAGCU CUGAUGAGGCCGUUAGGCCGAA AAUCUUCC | 4520 |
| 5233 | AUUCAGCU A GUUAGGAG | 744 | CUCCUAAC CUGAUGAGGCCGUUAGGCCGAA AGCUGAAU | 4521 |
| 5236 | CAGCUAGU U AGGAGCCC | 745 | GGGCUCCU CUGAUGAGGCCGUUAGGCCGAA ACUAGCUG | 4522 |
| 5237 | AGCUAGUU A GGAGCCCA | 746 | UGGGCUCC CUGAUGAGGCCGUUAGGCCGAA AACUAGCU | 4523 |
| 5247 | GAGCCCAU U UUUUCCUA | 747 | UAGGAAAA CUGAUGAGGCCGUUAGGCCGAA AUGGGCUC | 4524 |
| 5248 | AGCCCAUU U UUUCCUAA | 748 | UUAGGAAA CUGAUGAGGCCGUUAGGCCGAA AAUGGGCU | 4525 |
| 5249 | GCCCAUUU U UUCCUAAU | 749 | AUUAGGAA CUGAUGAGGCCGUUAGGCCGAA AAAUGGGC | 4526 |
| 5250 | CCCAUUUU U UCCUAAUC | 750 | GAUGAGGA CUGAUGAGGCCGUUAGGCCGAA AAAAUGGG | 4527 |
| 5251 | CCAUUUUU U CCUAAUCU | 751 | AGAUUAGG CUGAUGAGGCCGUUAGGCCGAA AAAAAUGG | 4528 |
| 5252 | CAUUUUUU C CUAAUCUG | 752 | CAGAUGAG CUGAUGAGGCCGUUAGGCCGAA AAAAAAUG | 4529 |
| 5255 | UUUUUCCU A AUCUGUGU | 753 | ACACAGAU CUGAUGAGGCCGUUAGGCCGAA AGGAAAAA | 4530 |
| 5258 | UUCCUAAU C UGUGUGUG | 754 | CACACACA CUGAUGAGGCCGUUAGGCCGAA AUUAGGAA | 4531 |
| 5273 | UGCCCUGU A ACCUGACU | 755 | AGUCAGGU CUGAUGAGGCCGUUAGGCCGAA ACAGGGCA | 4532 |
| 5285 | UGACUGGU U AACAGCAG | 756 | CUGCUGUU CUGAUGAGGCCGUUAGGCCGAA ACCAGUCA | 4533 |
| 5286 | GACUGGUU A ACAGCAGU | 757 | ACUGCUGU CUGAUGAGGCCGUUAGGCCGAA AACCAGUC | 4534 |
| 5295 | ACAGCAGU C CUUUGUAA | 758 | UUACAAAG CUGAUGAGGCCGUUAGGCCGAA ACUGCUGU | 4535 |
| 5298 | GCAGUCCU U UGUAAACA | 759 | UGUUUACA CUGAUGAGGCCGUUAGGCCGAA AGGACUGC | 4536 |
| 5299 | CAGUCCUG U GUAAACAG | 760 | CUGUUUAC CUGAUGAGGCCGUUAGGCCGAA AAGGACUG | 4537 |
| 5302 | UCCUUUGU A AACAGUGU | 761 | ACACUGUU CUGAUGAGGCCGUUAGGCCGAA ACAAAGGA | 4538 |
| 5311 | AACAGUGU U UUAAACUC | 762 | GAGUUUAA CUGAUGAGGCCGUUAGGCCGAA ACACUGUU | 4539 |
| 5312 | ACAGUGUU U UAAACUCU | 763 | AGAGUUUA CUGAUGAGGCCGUUAGGCCGAA AACACUGU | 4540 |
| 5313 | CAGUGUUU U AAACUCUC | 764 | GAGAGUUU CUGAUGAGGCCGUUAGGCCGAA AAACACUG | 4541 |
| 5314 | AGUGUUUU A AACUCUCC | 765 | GGAGAGUU CUGAUGAGGCCGUUAGGCCGAA AAAACACU | 4542 |
| 5319 | UUUAAACU C UCCUAGUC | 766 | GACUAGGA CUGAUGAGGCCGUUAGGCCGAA AGUUUAAA | 4543 |
| 5321 | UAAACUCU C CUAGUCAA | 767 | UUGACUAG CUGAUGAGGCCGUUAGGCCGAA AGAGUUUA | 4544 |
| 5324 | ACUCUCCU A GUCAAUAU | 768 | AUAUUGAC CUGAUGAGGCCGUUAGGCCGAA AGGAGAGU | 4545 |
| 5327 | CUCCUAGU C AAUAUCCA | 769 | UGGAUAUU CUGAUGAGGCCGUUAGGCCGAA ACUAGGAG | 4546 |
| 5331 | UAGUCAAU A UCCACCCC | 770 | GGGGUGGA CUGAUGAGGCCGUUAGGCCGAA AUUGACUA | 4547 |
| 5333 | GUCAAUAU C CACCCCAU | 771 | AUGGGGUG CUGAUGAGGCCGUUAGGCCGAA AUAUUGAC | 4548 |
| 5342 | CACCCCAU C CAAUUUAU | 772 | AUAAAUUG CUGAUGAGGCCGUUAGGCCGAA AUGGGGUG | 4549 |
| 5347 | CAUCCAAU U UAUCAAGG | 773 | CCUUGAUA CUGAUGAGGCCGUUAGGCCGAA AUUGGAUG | 4550 |
| 5348 | AUCCAAUU U AUCAAGGA | 774 | UCCUUGAU CUGAUGAGGCCGUUAGGCCGAA AAUUGGAU | 4551 |
| 5349 | UCCAAUUU A UCAAGGAA | 775 | UUCCUUGA CUGAUGAGGCCGUUAGGCCGAA AAAUUGGA | 4552 |
| 5351 | CAAUUUAU C AAGGAAGA | 776 | UCUUCCUU CUGAUGAGGCCGUUAGGCCGAA AUAAAUUG | 4553 |
| 5366 | GAAAUGGU U CAGAAAAU | 777 | AUUUUCUG CUGAUGAGGCCGUUAGGCCGAA ACCAUUUC | 4554 |
| 5367 | AAAUGGUU C AGAAAAUA | 778 | UAUUUUCU CUGAUGAGGCCGUUAGGCCGAA AACCAUUU | 4555 |
| 5375 | CAGAAAAU A UUUUCAGC | 779 | GCUGAAAA CUGAUGAGGCCGUUAGGCCGAA AUUUUCUG | 4556 |
| 5377 | GAAAAUAU U UUCAGCCU | 780 | AGGCUGAA CUGAUGAGGCCGUUAGGCCGAA AUAUUUUC | 4557 |
| 5378 | AAAAUAUU U UCAGCCUA | 781 | UAGGCUGA CUGAUGAGGCCGUUAGGCCGAA AAUAUUUU | 4558 |
| 5379 | AAAUAUUU U CAGCCUAC | 782 | GUAGGCUG CUGAUGAGGCCGUUAGGCCGAA AAAUAUUU | 4559 |
| 5380 | AAUAUUUU C AGCCUACA | 783 | UGUAGGCU CUGAUGAGGCCGUUAGGCCGAA AAAAUAUU | 4560 |
| 5386 | UUCAGCCU A CAGUUAUG | 784 | CAUAACUG CUGAUGAGGCCGUUAGGCCGAA AGGCUGAA | 4561 |
| 5391 | CCUACAGU U AUGUUCAG | 785 | CUGAACAU CUGAUGAGGCCGUUAGGCCGAA ACUGUAGG | 4562 |
| 5392 | CUACAGUU A UGUUCAGU | 786 | ACUGAACA CUGAUGAGGCCGUUAGGCCGAA AACUGUAG | 4563 |
| 5396 | AGUUAUGU U CAGUCACA | 787 | UGUGACUG CUGAUGAGGCCGUUAGGCCGAA ACAUAACU | 4564 |
| 5397 | GUUAUGUU C AGUCACAC | 788 | GUGUGACU CUGAUGAGGCCGUUAGGCCGAA AACAUAAC | 4565 |
| 5401 | UGUUCAGU C ACACACAC | 789 | GUGUGUGU CUGAUGAGGCCGUUAGGCCGAA ACUGAACA | 4566 |
| 5412 | ACACACAU A CAAAAUGU | 790 | ACAUUUUG CUGAUGAGGCCGUUAGGCCGAA AUGUGUGU | 4567 |
| 5421 | CAAAAUGU U CCUUUUGC | 791 | GCAAAAGG CUGAUGAGGCCGUUAGGCCGAA ACAUUUUG | 4568 |
| 5422 | AAAAUGUU C CUUUUGCU | 792 | AGCAAAAG CUGAUGAGGCCGUUAGGCCGAA AACAUUUU | 4569 |
| 5425 | AUGUUCCU U UUGCUUUU | 793 | AAAAGCAA CUGAUGAGGCCGUUAGGCCGAA AGGAACAU | 4570 |
| 5426 | UGUUCCUU U UGCUUUUA | 794 | UAAAAGCA CUGAUGAGGCCGUUAGGCCGAA AAGGAACA | 4571 |
| 5427 | GUUCCUUU U GCUUUUAA | 795 | UUAAAAGC CUGAUGAGGCCGUUAGGCCGAA AAAGGAAC | 4572 |
| 5431 | CUUUUGCU U UUAAAGUA | 796 | UACUUUAA CUGAUGAGGCCGUUAGGCCGAA AGCAAAAG | 4573 |
| 5432 | UUUUGCUU U UAAAGUAA | 797 | UUACUUUA CUGAUGAGGCCGUUAGGCCGAA AAGCAAAA | 4574 |
| 5433 | UUUGCUUU U AAAGUAAU | 798 | AUUACUUU CUGAUGAGGCCGUUAGGCCGAA AAAGCAAA | 4575 |
| 5434 | UUGCUUUU A AAGUAAUU | 799 | AAUUACUU CUGAUGAGGCCGUUAGGCCGAA AAAAGCAA | 4576 |
| 5439 | UUUAAAGU A AUUUUUGA | 800 | UCAAAAAU CUGAUGAGGCCGUUAGGCCGAA ACUUUAAA | 4577 |
| 5442 | AAAGUAAU U UUUGACUC | 801 | GAGUCAAA CUGAUGAGGCCGUUAGGCCGAA AUUACUUU | 4578 |
| 5443 | AAGUAAUU U UUGACUCC | 802 | GGAGUCAA CUGAUGAGGCCGUUAGGCCGAA AAUUACUU | 4579 |
| 5444 | AGUAAUUU U UGACUCCC | 803 | GGGAGUCA CUGAUGAGGCCGUUAGGCCGAA AAAUUACU | 4580 |
| 5445 | GUAAUUUU U GACUCCCA | 804 | UGGGAGUC CUGAUGAGGCCGUUAGGCCGAA AAAAUUAC | 4581 |
| 5450 | UUUUGACU C CCAGAUCA | 805 | UGAUCUGG CUGAUGAGGCCGUUAGGCCGAA AGUCAAAA | 4582 |
| 5457 | UCCCAGAU C AGUCAGAG | 806 | CUCUGACU CUGAUGAGGCCGUUAGGCCGAA AUCUGGGA | 4583 |
| 5461 | AGAUCAGU C AGAGCCCC | 807 | GGGGCUCU CUGAUGAGGCCGUUAGGCCGAA ACUGAUCU | 4584 |
| 5471 | GAGCCCCU A CAGCAUUG | 808 | CAAUGCUG CUGAUGAGGCCGUUAGGCCGAA AGGGGCUC | 4585 |
| 5478 | UACAGCAU U GUUAAGAA | 809 | UUCUUAAC CUGAUGAGGCCGUUAGGCCGAA AUGCUGUA | 4586 |
| 5481 | AGCAUUGU U AAGAAAGU | 810 | ACUUUCUU CUGAUGAGGCCGUUAGGCCGAA ACAAUGCU | 4587 |
| 5482 | GCAUUGUU A AGAAAGUA | 811 | UACUUUCU CUGAUGAGGCCGUUAGGCCGAA AACAAUGC | 4588 |
| 5490 | AAGAAAGU A UUUGAUUU | 812 | AAAUCAAA CUGAUGAGGCCGUUAGGCCGAA ACUUUCUU | 4589 |
| 5492 | GAAAGUAU U UGAUUUUU | 813 | AAAAAUCA CUGAUGAGGCCGUUAGGCCGAA AUACUUUC | 4590 |
| 5493 | AAAGUAUU U GAUUUUUG | 814 | CAAAAAUC CUGAUGAGGCCGUUAGGCCGAA AAUACUUU | 4591 |
| 5497 | UAUUUGAU U UUUGUCUC | 815 | GAGACAAA CUGAUGAGGCCGUUAGGCCGAA AUCAAAUA | 4592 |
| 5498 | AUUUGAUU U UUGUCUCA | 816 | UGAGACAA CUGAUGAGGCCGUUAGGCCGAA AAUCAAAU | 4593 |
| 5499 | UUUGAUUU U UGUCUCAA | 817 | UUGAGACA CUGAUGAGGCCGUUAGGCCGAA AAAUCAAA | 4594 |
| 5500 | UUGAUUUU U GUCUCAAU | 818 | AUUGAGAC CUGAUGAGGCCGUUAGGCCGAA AAAAUCAA | 4595 |
| 5503 | AUUUUUGU C UCAAUGAA | 819 | UUCAUUGA CUGAUGAGGCCGUUAGGCCGAA ACAAAAAU | 4596 |
| 5505 | UUUUGUCU C AAUGAAAA | 820 | UUUUCAUU CUGAUGAGGCCGUUAGGCCGAA AGACAAAA | 4597 |
| 5515 | AUGAAAAU A AAACUAUA | 821 | UAUAGUUU CUGAUGAGGCCGUUAGGCCGAA AUUUUCAU | 4598 |
| 5521 | AUAAAACU A UAUUCAUU | 822 | AAUGAAUA CUGAUGAGGCCGUUAGGCCGAA AGUUUUAU | 4599 |
| 5523 | AAAACUAU A UUCAUUUC | 823 | GAAAUGAA CUGAUGAGGCCGUUAGGCCGAA AUAGUUUU | 4600 |

Input Sequence = NM_005228.1.
Cut Site = UH/.
Arm Length = 8.
Core Sequence = CUGAUGAG GCCGUUAGGC CGAA NM_005228.1 (Homo sapiens epidermal growth factor receptor (avian erythroblastic leukemia viral (v-erb-b) oncogene homolog) (EGFR), mRNA)

[0221] Underlined region can be any X sequence or linker, as described herein.

TABLE IV

Human EGFR Receptor Inozyme and Substrate Sequence

| | | | | |
|---|---|---|---|---|
| Pos | Substrate | Seq ID | Inozyme | Seq ID |

| | | | | |
|---|---|---|---|---|
| 13 | CGCUGCGC C GGAGUCCC | 824 | GGGACUCC CUGAUGAGGCCGUUAGGCCGAA ICGCAGCG | 4601 |
| 20 | CCGGAGUC C CGAGCUAG | 825 | CUAGCUCG CUGAUGAGGCCGUUAGGCCGAA IACUCCGG 4602 | |
| 21 | CGGAGUCC C GAGCUAGC | 826 | GCUAGCUC CUGAUGAGGCCGUUAGGCCCAA IGACUCCG | 4603 |
| 26 | UCCCGAGC U AGCCCCGG | 827 | CCGGGGCU CUGAUGAGGCCGUUAGGCCGAA ICUCGGGA | 4604 |
| 30 | GAGCUAGC C CCGGCGCC | 828 | GGCGCCGG CUGAUGAGGCCGUUAGGCCGAA ICUAGCUC | 4605 |
| 31 | AGCUAGCC C CGGCGCCG | 829 | CGGCGCCG CUGAUGAGGCCGUUAGGCCGAA IGCUAGCU | 4606 |
| 32 | GCUAGCCC C GGCGCCGC | 830 | GCGGCGCC CUGAUGAGGCCGUUAGGCCGAA IGGCUAGC | 4607 |
| 38 | CCCGGCGC C GCCGCCGC | 831 | GCGGCGGC CUGAUGAGGCCGUUAGGCCGAA ICGCCGGG | 4608 |
| 41 | GGCGCCGC C GCCGCCCA | 832 | UGGGCGGC CUGAUGAGGCCGUUAGGCCGAA ICGGCGCC | 4609 |
| 44 | GCCGCCGC C GCCCAGAC | 833 | GUCUGGGC CUGAUGAGGCCGUUAGGCCGAA ICGGCGGC | 4610 |
| 47 | GCCGCCGC C CAGACCGG | 834 | CCGGUCUG CUGAUGAGGCCGUUAGGCCGAA ICGGCGGC | 4611 |
| 48 | CCGCCGCC C AGACCGGA | 835 | UCCGGUCU CUGAUGAGGCCGUUAGGCCGAA IGCGGCGG | 4612 |
| 49 | CGCCGCCC A GACCGGAC | 836 | GUCCGGUC CUGAUGAGGCCGUUAGGCCGAA IGGCGGCG | 4613 |
| 53 | GCCCAGAC C GGACGACA | 837 | UGUCGUCC CUGAUGAGGCCGUUAGGCCGAA IUCUGGGC | 4614 |
| 61 | CGGACGAC A GGCCACCU | 838 | AGGUGGCC CUGAUGAGGCCGUUAGGCCGAA IUCGUCCG | 4615 |
| 65 | CGACAGGC C ACCUCGUC | 839 | GACGAGGU CUGAUGAGGCCGUUAGGCCGAA ICCUGUCG | 4616 |
| 66 | GACAGGCC A CCUCGUCG | 840 | CGACGAGG CUGAUGAGGCCGUUAGGCCGAA IGCCUGUC | 4617 |
| 68 | CAGGCCAC C UCGUCGGC | 841 | GCCGACGA CUGAUGAGGCCGUUAGGCCCGAA IUGGCCUG | 4618 |
| 69 | AGGCCACC U CGUCGGCG | 842 | CGCCGACG CUGAUGAGGCCGUUAGGCCGAA IGUGGCCU | 4619 |
| 80 | UCGGCGUC C GCCCGAGU | 843 | ACUCGGGC CUGAUGAGGCCGUUAGGCCGAA IACGCCGA | 4620 |
| 83 | GCGUCCGC C CGAGUCCC | 844 | GGGACUCG CUGAUGAGGCCGUUAGGCCGAA ICGGACGC | 4621 |
| 84 | CGUCCGCC C GAGUCCCC | 845 | GGGGACUC CUGAUGAGGCCGUUAGGCCGAA IGCGGACG | 4622 |
| 90 | CCCGAGUC C CCGCCUCG | 846 | CGAGGCGG CUGAUGAGGCCGUUAGGCCGAA IACUCGGG | 4623 |
| 91 | CCGAGUCC C CGCCUCGC | 847 | GCGAGGCG CUGAUGAGGCCGUUAGGCCGAA IGACUCGG | 4624 |
| 92 | CGAGUCCC C GCCUCGCC | 848 | GGCGAGGC CUGAUGAGGCCGUUAGGCCGAA IGGACUCG | 4625 |
| 95 | GUCCCCGC C UCGCCGCC | 849 | GGCGGCGA CUGAUGAGGCCGUUAGGCCGAA ICGGGGAC | 4626 |
| 96 | UCCCCGCC U CGCCGCCA | 850 | UGGCGGCG CUGAUGAGGCCGUUAGGCCGAA IGCGGGGA | 4627 |
| 100 | CGCCUCGC C GCCAACGC | 851 | GCGUUGGC CUGAUGAGGCCGUUAGGCCGAA ICGAGGCG | 4628 |
| 103 | CUCGCCGC C AACGCCAC | 852 | GUGGCGUU CUGAUGAGGCCGUUAGGCCGAA ICGGCGAG | 4629 |
| 104 | UCGCCGCC A ACGCCACA | 853 | UGUGGCGU CUGAUGAGGCCGUUAGGCCGAA IGCGGCGA | 4630 |
| 109 | GCCAACGC C ACAACCAC | 854 | GUGGUUGU CUGAUGAGGCCGUUAGGCCGAA ICGUUGGC | 4631 |
| 110 | CCAACGCC A CAACCACC | 855 | GGUGGUUG CUGAUGAGGCCGUUAGGCCGAA IGCGUUGG | 4632 |
| 112 | AACGCCAC A ACCACCGC | 856 | GCGGUGGU CUGAUGAGGCCGUUAGGCCGAA IUGGCGUU | 4633 |
| 115 | GCCACAAC C ACCGCGCA | 857 | UGCGCGGU CUGAUGAGGCCGUUAGGCCGAA IUUGUGGC | 4634 |
| 116 | CCACAACC A CCGCGCAC | 858 | GUGCGCGG CUGAUGAGGCCGUUAGGCCGAA IGUUGUGG | 4635 |
| 118 | ACAACCAC C GCGCACGG | 859 | CCGUGCGC CUGAUGAGGCCGUUAGGCCGAA IUGGUUGU | 4636 |
| 123 | CACCGCGC A CGGCCCCC | 860 | GGGGGCCG CUGAUGAGGCCGUUAGGCCGAA ICGCGGUG | 4637 |
| 128 | CGCACGGC C CCCUGACU | 861 | AGUCAGGG CUGAUGAGGCCGUUAGGCCGAA ICCGUGCG | 4638 |
| 129 | GCACGGCC C CCUGACUC | 862 | GAGUCAGG CUGAUGAGGCCGUUAGGCCGAA IGCCGUGC | 4639 |
| 130 | CACGGCCC C CUGACUCC | 863 | GGAGUCAG CUGAUGAGGCCGUUAGGCCGAA IGGCCGUG | 4640 |
| 131 | ACGGCCCC C UGACUCCG | 864 | CGGAGUCA CUGAUGAGGCCGUUAGGCCGAA IGGGCCGU | 4641 |
| 132 | CGGCCCCC U GACUCCGU | 865 | ACGGAGUC CUGAUGAGGCCGUUAGGCCGAA IGGGGCCG | 4642 |
| 136 | CCCCUGAC U CCGUCCAG | 866 | CUGGACGG CUGAUGAGGCCGUUAGGCCGAA IUCAGGGG | 4643 |
| 138 | CCUGACUC C GUCCAGUA | 867 | UACUGGAC CUGAUGAGGCCGUUAGGCCGAA IAGUCAGG | 4644 |
| 142 | ACUCCGUC C AGUAUUGA | 868 | UCAAUACU CUGAUGAGGCCGUUAGGCCGAA IACGGAGU | 4645 |
| 143 | CUCCGUCC A GUAUUGAU | 869 | AUCAAUAC CUGAUGAGGCCGUUAGGCCGAA IGACGGAG | 4646 |
| 161 | GGGAGAGC C GGAGCGAG | 870 | CUCGCUCC CUGAUGAGGCCGUUAGGCCGAA ICUCUCCC | 4647 |
| 171 | GAGCGAGC U CUUCGGGG | 871 | CCCCGAAG CUGAUGAGGCCGUUAGGCCGAA ICUCGCUC | 4648 |
| 173 | GCGAGCUC U UCGGGGAG | 872 | CUCCCCGA CUGAUGAGGCCGUUAGGCCGAA IAGCUCGC | 4649 |
| 183 | CGGGGAGC A GCGAUGCG | 873 | CGCAUCGC CUGAUGAGGCCGUUAGGCCGAA ICUCCCCG | 4650 |
| 194 | GAUGCGAC C CUCCGGGA | 874 | UCCCGGAG CUGAUGAGGCCGUUAGGCCGAA IUCGCAUC | 4651 |
| 195 | AUGCGACC C UCCGGGAC | 875 | GUCCCGGA CUGAUGAGGCCGUUAGGCCGAA IGUCGCAU | 4652 |
| 196 | UGCGACCC U CCGGGACG | 876 | CGUCCCGG CUGAUGAGGCCGUUAGGCCGAA IGGUCGCA | 4653 |
| 198 | CGACCCUC C GGGACGGC | 877 | GCCGUCCC CUGAUGAGGCCGUUAGGCCGAA IAGGGUCG | 4654 |
| 207 | GGGACGGC C GGGGCAGC | 878 | GCUGCCCC CUGAUGAGGCCGUUAGGCCGAA ICCGUCCC | 4655 |
| 213 | GCCGGGGC A GCGCUCCU | 879 | AGGAGCGC CUGAUGAGGCCGUUAGGCCGAA ICCCCGGC | 4656 |
| 218 | GGCAGCGC U CCUGGCGC | 880 | GCGCCAGG CUGAUGAGGCCGUUAGGCCGAA ICGCUGCC | 4657 |
| 220 | CAGCGCUC C UGGCGCUG | 881 | CAGCGCCA CUGAUGAGGCCGUUAGGCCGAA IAGCGCUG | 4658 |
| 221 | AGCGCUCC U GGCGCUGC | 882 | GCAGCGCC CUGAUGAGGCCGUUAGGCCGAA IGAGCGCU | 4659 |
| 227 | CCUGGCGC U GCUGGCUG | 883 | CAGCCAGC CUGAUGAGGCCGUUAGGCCGAA ICGCCAGG | 4660 |
| 230 | GGCGCUGC U GGCUGCGC | 884 | GCGCAGCC CUGAUGAGGCCGUUAGGCCGAA ICAGCGCC | 4661 |
| 234 | CUGCUGGC U GCGCUCUG | 885 | CAGAGCGC CUGAUGAGGCCGUUAGGCCGAA ICCAGCAG | 4662 |
| 239 | GGCUGCGC U CUGCCCGG | 886 | CCGGGCAG CUGAUGAGGCCGUUAGGCCGAA ICGCAGCC | 4663 |
| 241 | CUGCGCUC U GCCCGGCG | 887 | CGCCGGGC CUGAUGAGGCCGUUAGGCCGAA IAGCGCAG | 4664 |
| 244 | CGCUCUGC C CGGCGAGU | 888 | ACUCGCCG CUGAUGAGGCCGUUAGGCCGAA ICAGAGCG | 4665 |
| 245 | GCUCUGCC C GGCGAGUC | 889 | GACUCGCC CUGAUGAGGCCGUUAGGCCGAA IGCAGAGC | 4666 |
| 258 | AGUCGCGC U CUGGAGGA | 890 | UCCUCCAG CUGAUGAGGCCGUUAGGCCGAA ICCCGACU | 4667 |
| 260 | UCGGGCUC U GGAGGAAA | 891 | UUUCCUCC CUGAUGAGGCCGUUAGGCCGAA IAGCCCGA | 4668 |
| 280 | AAGUUUGC C AAGGCACG | 892 | CGUGCCUU CUGAUGAGGCCGUUAGGCCGAA ICAAACUU | 4669 |
| 281 | AGUUUGCC A AGGCACGA | 893 | UCGUGCCU CUGAUGAGGCCGUUAGGCCGAA IGCAAACU | 4670 |
| 286 | GCCAAGGC A CGAGUAAC | 894 | GUUACUCG CUGAUGAGGCCGUUAGGCCGAA ICCUUGGC | 4671 |
| 295 | CGAGUAAC A AGCUCACG | 895 | CGUGAGCU CUGAUGAGGCCGUUAGGCCGAA IUUACUCG | 4672 |
| 299 | UAACAAGC U CACGCAGU | 896 | ACUGCGUG CUGAUGAGGCCGUUAGGCCGAA ICUUGUUA | 4673 |
| 301 | ACAAGCUC A CGCAGUUG | 897 | CAACUGCG CUGAUGAGGCCGUUAGGCCGAA IAGCUUGU | 4674 |
| 305 | GCUCACGC A GUUGGGCA | 898 | UGCCCAAC CUGAUGAGGCCGUUAGGCCGAA ICGUGAGC | 4675 |
| 313 | AGUUGGGC A CUUUUGAA | 899 | UUCAAAAG CUGAUGAGGCCGUUAGGCCGAA ICCCAACU | 4676 |
| 315 | UUGGGCAC U UUUGAAGA | 900 | UCUUCAAA CUGAUGAGGCCGUUAGGCCGAA IUGCCCAA | 4677 |
| 326 | UGAAGAUC A UUUUCUCA | 901 | UGAGAAAA CUGAUGAGGCCGUUAGGCCGAA IAUCUUCA | 4678 |
| 332 | UCAUUUUC U CAGCCUCC | 902 | GGAGGCUG CUGAUGAGGCCGUUAGGCCGAA IAAAAUGA | 4679 |
| 334 | AUUUUCUC A GCCUCCAG | 903 | CUGGAGGC CUGAUGAGGCCGUUAGGCCGAA IAGAAAAU | 4680 |
| 337 | UUCUCAGC C UCCAGAGG | 904 | CCUCUGGA CUGAUGAGGCCGUUAGGCCGAA ICUGAGAA | 4681 |
| 338 | UCUCAGCC U CCAGAGGA | 905 | UCCUCUGG CUGAUGAGGCCGUUAGGCCGAA IGCUGAGA | 4682 |
| 340 | UCAGCCUC C AGAGGAUG | 906 | CAUCCUCU CUGAUGAGGCCGUUAGGCCGAA IAGGCUGA | 4683 |
| 341 | CAGCCUCC A GAGGAUGU | 907 | ACAUCCUC CUGAUGAGGCCGUUAGGCCGAA IGAGGCUG | 4684 |
| 352 | GGAUGUUC A AUAACUGU | 908 | ACAGUUAU CUGAUGAGGCCGUUAGGCCGAA IAACAUCC | 4685 |
| 358 | UCAAUAAC U GUGAGGUG | 909 | CACCUCAC CUGAUGAGGCCGUUAGGCCGAA IUUAUUGA | 4686 |
| 370 | AGGUGGUC C UUGGGAAU | 910 | AUUCCCAA CUGAUGAGGCCGUUAGGCCGAA IACCACCU | 4687 |
| 371 | GGUGGUCC U UGGGAAUU | 911 | AAUUCCCA CUGAUGAGGCCGUUAGGCCGAA IGACCACC | 4688 |
| 390 | GAAAUUAC C UAUGUGCA | 912 | UGCACAUA CUGAUGAGGCCGUUAGGCCGAA IUAAUUUC | 4689 |
| 391 | AAAUUACC U AUGUGCAG | 913 | CUGCACAU CUGAUGAGGCCGUUAGGCCGAA IGUAAUUU | 4690 |
| 398 | CUAUGUGC A GAGGAAUU | 914 | AAUUCCUC CUGAUGAGGCCGUUAGGCCGAA ICACAUAG | 4691 |
| 413 | UUAUGAUC U UUCCUUCU | 915 | AGAAGGAA CUGAUGAGGCCGUUAGGCCGAA IAUCAUAA | 4692 |
| 417 | GAUCUUUC C UUCUUAAA | 916 | UUUAAGAA CUGAUGAGGCCGUUAGGCCGAA IAAAGAUC | 4693 |
| 418 | AUCUUUCC U UCUUAAAG | 917 | CUUUAAGA CUGAUGAGGCCGUUAGGCCGAA IGAAAGAU | 4694 |
| 421 | UUUCCUUC U UAAAGACC | 918 | GGUCUUUA CUGAUGAGGCCGUUAGGCCGAA IAAGGAAA | 4695 |
| 429 | UUAAAGAC C AUCCAGGA | 919 | UCCUGGAU CUGAUGAGGCCGUUAGGCCGAA IUCUUUAA | 4696 |
| 430 | UAAAGACC A UCCAGGAG | 920 | CUCCUGGA CUGAUGAGGCCGUUAGGCCGAA IGUCUUUA | 4697 |
| 433 | AGACCAUC C AGGAGGUG | 921 | CACCUCCU CUGAUGAGGCCGUUAGGCCGAA IAUGGUCU | 4698 |
| 434 | GACCAUCC A GGAGGUGG | 922 | CCACCUCC CUGAUGAGGCCGUUAGGCCGAA IGAUGGUC | 4699 |
| 444 | GAGGUGGC U GGUUAUGU | 923 | ACAUAACC CUGAUGAGGCCGUUAGGCCGAA ICCACCUC | 4700 |
| 454 | GUUAUGUC C UCAUUGCC | 924 | GGCAAUGA CUGAUGAGGCCGUUAGGCCGAA IACAUAAC | 4701 |
| 455 | UUAUGUCC U CAUUGCCC | 925 | GGGCAAUG CUGAUGAGGCCGUUAGGCCGAA IGACAUAA | 4702 |
| 457 | AUGUCCUC A UUGCCCUC | 926 | GAGGGCAA CUGAUGAGGCCGUUAGGCCGAA IAGGACAU | 4703 |
| 462 | CUCAUUGC C CUCAACAC | 927 | GUGUUGAG CUGAUGAGGCCGUUAGGCCGAA ICAAUGAG | 4704 |
| 463 | UCAUUGCC C UCAACACA | 928 | UGUGUUGA CUGAUGAGGCCGUUAGGCCGAA IGCAAUGA | 4705 |
| 464 | CAUUGCCC U CAACACAG | 929 | CUGUGUUG CUGAUGAGGCCGUUAGGCCGAA IGGCAAUG | 4706 |
| 466 | UUGCCCUC A ACACAGUG | 930 | CACUGUGU CUGAUGAGGCCGUUAGGCCGAA IAGGGCAA | 4707 |
| 469 | CCCUCAAC A CAGUGGAG | 931 | CUCCACUG CUGAUGAGGCCGUUAGGCCGAA IUUGAGGG | 4708 |
| 471 | CUCAACAC A GUGGAGCG | 932 | CGCUCCAC CUGAUGAGGCCGUUAGGCCGAA IUGUUGAG | 4709 |
| 485 | GCGAAUUC C UUUGGAAA | 933 | UUUCCAAA CUGAUGAGGCCGUUAGGCCGAA IAAUUCGC | 4710 |
| 486 | CGAAUUCC U UUGGAAAA | 934 | UUUUCCAA CUGAUGAGGCCGUUAGGCCGAA IGAAUUCG | 4711 |
| 496 | UGGAAAAC C UGCAGAUC | 935 | GAUCUGCA CUGAUGAGGCCGUUAGGCCGAA IUUUUCCA | 4712 |
| 497 | GGAAAACC U GCAGAUCA | 936 | UGAUCUGC CUGAUGAGGCCGUUAGGCCGAA IGUUUUCC | 4713 |
| 500 | AAACCUGC A GAUCAUCA | 937 | UGAUGAUC CUGAUGAGGCCGUUAGGCCGAA ICAGGUUU | 4714 |
| 505 | UGCAGAUC A UCAGAGGA | 938 | UCCUCUGA CUGAUGAGGCCGUUAGGCCGAA IAUCUGCA | 4715 |
| 508 | AGAUCAUC A GAGGAAAU | 939 | AUUUCCUC CUGAUGAGGCCGUUAGGCCGAA IAUGAUCU | 4716 |
| 523 | AUAUGUAC U ACGAAAAU | 940 | AUUUUCGU CUGAUGAGGCCGUUAGGCCGAA IUACAUAU | 4717 |
| 534 | GAAAAUUC C UAUGCCUU | 941 | AAGGCAUA CUGAUGAGGCCGUUAGGCCGAA IAAUUUUC | 4718 |
| 535 | AAAAUUCC U AUGCCUUA | 942 | UAAGGCAU CUGAUGAGGCCGUUAGGCCGAA IGAAUUUU | 4719 |
| 540 | UCCUAUGC C UUAGCAGU | 943 | ACUGCUAA CUGAUGAGGCCGUUAGGCCGAA ICAUAGGA | 4720 |
| 541 | CCUAUGCC U UAGCAGUC | 944 | GACUGCUA CUGAUGAGGCCGUUAGGCCGAA IGCAUAGG | 4721 |
| 546 | GCCUUAGC A GUCUUAUC | 945 | GAUAAGAC CUGAUGAGGCCGUUAGGCCGAA ICUAAGGC | 4722 |
| 550 | UAGCAGUC U UAUCUAAC | 946 | GUUAGAUA CUGAUGAGGCCGUUAGGCCGAA IACUGCUA | 4723 |
| 555 | GUCUUAUC U AACUAUGA | 947 | UCAUAGUU CUGAUGAGGCCGUUAGGCCGAA IAUAAGAC | 4724 |
| 559 | UAUCUAAC U AUGAUGCA | 948 | UGCAUCAU CUGAUGAGGCCGUUAGGCCGAA IUUAGAUA | 4725 |
| 567 | UAUGAUGC A AAUAAAAC | 949 | GUUUUAUU CUGAUGAGGCCGUUAGGCCGAA ICAUCAUA | 4726 |
| 576 | AAUAAAAC C GGACUGAA | 950 | UUCAGUCC CUGAUGAGGCCGUUAGGCCGAA IUUUUAUU | 4727 |
| 581 | AACCGGAC U GAAGGAGC | 951 | GCUCCUUC CUGAUGAGGCCGUUAGGCCGAA IUCCGGUU | 4728 |
| 590 | GAAGGAGC U GCCCAUGA | 952 | UCAUGGGC CUGAUGAGGCCGUUAGGCCGAA ICUCCUUC | 4729 |
| 593 | GGAGCUGC C CAUGAGAA | 953 | UUCUCAUG CUGAUGAGGCCGUUAGGCCGAA ICAGCUCC | 4730 |
| 594 | GAGCUGCC C AUGAGAAA | 954 | UUUCUCAU CUGAUGAGGCCGUUAGGCCGAA IGCAGCUC | 4731 |
| 595 | AGCUGCCC A UGAGAAAU | 955 | AUUUCUCA CUGAUGAGGCCGUUAGGCCGAA IGGCAGCU | 4732 |
| 608 | AAAUUUAC A GGAAAUCC | 956 | GGAUUUCC CUGAUGAGGCCGUUAGGCCGAA IUAAAUUU | 4733 |
| 616 | AGGAAAUC C UGCAUGGC | 957 | GCCAUGCA CUGAUGAGGCCGUUAGGCCGAA IAUUUCCU | 4734 |
| 617 | GGAAAUCC U GCAUGGCG | 958 | CGCCAUGC CUGAUGAGGCCGUUAGGCCGAA IGAUUUCC | 4735 |
| 620 | AAUCCUGC A UGGCGCCG | 959 | CGGCGCCA CUGAUGAGGCCGUUAGGCCGAA ICAGGAUU | 4736 |
| 627 | CAUGGCGC C GUGCGGUU | 960 | AACCGCAC CUGAUGAGGCCGUUAGGCCGAA ICGCCAUG | 4737 |
| 637 | UGCGGUUC A GCAACAAC | 961 | GUUGUUGC CUGAUGAGGCCGUUAGGCCGAA IAACCGCA | 4738 |
| 640 | GGUUCAGC A ACAACCCU | 962 | AGGGUUGU CUGAUGAGGCCGUUAGGCCGAA ICUGAACC | 4739 |
| 643 | UCAGCAAC A ACCCUGCC | 963 | GGCAGGGU CUGAUGAGGCCGUUAGGCCGAA IUUGCUGA | 4740 |
| 646 | GCAACAAC C CUGCCCUG | 964 | CAGGGCAG CUGAUGAGGCCGUUAGGCCGAA IUUGUUGC | 4741 |
| 647 | CAACAACC C UGCCCUGU | 965 | ACAGGGCA CUGAUGAGGCCGUUAGGCCGAA IGUUGUUG | 4742 |
| 648 | AACAACCC U GCCCUGUG | 966 | CACAGGGC CUGAUGAGGCCGUUAGGCCGAA IGGUUGUU | 4743 |
| 651 | AACCCUGC C CUGUGCAA | 967 | UUGCACAG CUGAUGAGGCCGUUAGGCCGAA ICAGGGUU | 4744 |
| 652 | ACCCUGCC C UGUGCAAC | 968 | GUUGCACA CUGAUGAGGCCGUUAGGCCGAA IGCAGGGU | 4745 |
| 653 | CCCUGCCC U GUGCAACG | 969 | CGUUGCAC CUGAUGAGGCCGUUAGGCCGAA IGGCAGGG | 4746 |
| 658 | CCCUGUGC A ACGUGGAG | 970 | CUCCACGU CUGAUGAGGCCGUUAGGCCGAA ICACAGGG | 4747 |
| 670 | UGGAGAGC A UCCAGUGG | 971 | CCACUGGA CUGAUGAGGCCGUUAGGCCGAA ICUCUCCA | 4748 |
| 673 | AGAGCAUC C AGUGGCGG | 972 | CCGCCACU CUGAUGAGGCCGUUAGGCCGAA IAUGCUCU | 4749 |
| 674 | GAGCAUCC A GUGGCGGG | 973 | CCCGCCAC CUGAUGAGGCCGUUAGGCCGAA IGAUGCUC | 4750 |
| 685 | GGCGGGAC A UAGUCAGC | 974 | GCUGACUA CUGAUGAGGCCGUUAGGCCGAA IUCCCGCC | 4751 |
| 691 | ACAUAGUC A GCAGUGAC | 975 | GUCACUGC CUGAUGAGGCCGUUAGGCCGAA IACUAUGU | 4752 |
| 694 | UAGUCAGC A GUGACUUU | 976 | AAAGUCAC CUGAUGAGGCCGUUAGGCCGAA ICUGACUA | 4753 |
| 700 | GCAGUGAC U UUCUCAGC | 977 | GCUGAGAA CUGAUGAGGCCGUUAGGCCGAA IUCACUGC | 4754 |
| 704 | UGACUUUC U CAGCAACA | 978 | UGUUGCUG CUGAUGAGGCCGUUAGGCCGAA IAAAGUCA | 4755 |
| 706 | ACUUUCUC A GCAACAUG | 979 | CAUGUUGC CUGAUGAGGCCGUUAGGCCGAA IAGAAAGU | 4756 |
| 709 | UUCUCAGC A ACAUGUCG | 980 | CGACAUGU CUGAUGAGGCCGUUAGGCCGAA ICUGAGAA | 4757 |
| 712 | UCAGCAAC A UGUCGAUG | 981 | CAUCGACA CUGAUGAGGCCGUUAGGCCGAA IUUGCUGA | 4758 |
| 724 | CGAUGGAC U UCCAGAAC | 982 | GUUCUGGA CUGAUGAGGCCGUUAGGCCGAA IUCCAUCG | 4759 |
| 727 | UGGACUUC C AGAACCAC | 983 | GUGGUUCU CUGAUGAGGCCGUUAGGCCGAA IAAGUCCA | 4760 |
| 728 | GGACUUCC A GAACCACC | 984 | GGUGGUUC CUGAUGAGGCCGUUAGGCCGAA IGAAGUCC | 4761 |
| 733 | UCCAGAAC C ACCUGGGC | 985 | GCCCAGGU CUGAUGAGGCCGUUAGGCCGAA IUUCUGGA | 4762 |
| 734 | CCAGAACC A CCUGGGCA | 986 | UGCCCAGG CUGAUGAGGCCGUUAGGCCGAA IGUUCUGG | 4763 |
| 736 | AGAACCAC C UGGGCAGC | 987 | GCUGCCCA CUGAUGAGGCCGUUAGGCCGAA IUGGUUCU | 4764 |
| 737 | GAACCACC U GGGCAGCU | 988 | AGCUGCCC CUGAUGAGGCCGUUAGGCCGAA IGUGGUUC | 4765 |
| 742 | ACCUGGGC A GCUGCCAA | 989 | UUGGCAGC CUGAUGAGGCCGUUAGGCCGAA ICCCAGGU | 4766 |
| 745 | UGGGCAGC U GCCAAAAG | 990 | CUUUUGGC CUGAUGAGGCCGUUAGGCCGAA ICUGCCCA | 4767 |
| 748 | GCAGCUGC C AAAAGUGU | 991 | ACACUUUU CUGAUGAGGCCGUUAGGCCGAA ICAGCUGC | 4768 |
| 749 | CAGCUGCC A AAAGUGUG | 992 | CACACUUU CUCAUGAGGCCGUUAGGCCGAA IGCAGCUG | 4769 |
| 761 | GUGUGAUC C AAGCUGUC | 993 | GACAGCUU CUGAUGAGGCCGUUAGGCCGAA IAUCACAC | 4770 |
| 762 | UGUGAUCC A AGCUGUCC | 994 | GGACAGCU CUGAUGAGGCCGUUAGGCCGAA IGAUCACA | 4771 |
| 766 | AUCCAAGC U GUCCCAAU | 995 | AUUGGGAC CUGAUGAGGCCGUUAGGCCGAA ICUUGGAU | 4772 |
| 770 | AAGCUGUC C CAAUGGGA | 996 | UCCCAUUG CUGAUGAGGCCGUUAGGCCGAA IACAGCUU | 4773 |
| 771 | AGCUGUCC C AAUGGGAG | 997 | CUCCCAUU CUGAUGAGGCCGUUAGGCCGAA IGACAGCU | 4774 |
| 772 | GCUGUCCC A AUGGGAGC | 998 | GCUCCCAU CUGAUGAGGCCGUUAGGCCGAA IGGACAGC | 4775 |
| 781 | AUGGGAGC U GCUGGGGU | 999 | ACCCCAGC CUGAUGAGGCCGUUAGGCCGAA ICUCCCAU | 4776 |
| 784 | GGAGCUGC U GGGGUGCA | 1000 | UGCACCCC CUGAUGAGGCCGUUAGGCCGAA ICAGCUCC | 4777 |
| 792 | UGGGGUGC A GGAGAGGA | 1001 | UCCUCUCC CUGAUGAGGCCGUUAGGCCGAA ICACCCCA | 4778 |
| 805 | AGGAGAAC U GCCAGAAA | 1002 | UUUCUGGC CUGAUGAGGCCGUUAGGCCGAA IUUCUCCU | 4779 |
| 808 | AGAACUGC C AGAAACUG | 1003 | CAGUUUCU CUGAUGAGGCCGUUAGGCCGAA ICAGUUCU | 4780 |
| 809 | GAACUGCC A GAAACUGA | 1004 | UCAGUUUC CUGAUGAGGCCGUUAGGCCGAA IGCAGUUC | 4781 |
| 815 | CCAGAAAC U GACCAAAA | 1005 | UUUUGGUC CUGAUGAGGCCGUUAGGCCGAA IUUUCUGG | 4782 |
| 819 | AAACUGAC C AAAAUCAU | 1006 | AUGAUUUU CUGAUGAGGCCGUUAGGCCGAA IUCAGUUU | 4783 |
| 820 | AACUGACC A AAAUCAUC | 1007 | GAUGAUUU CUGAUGAGGCCGUUAGGCCGAA IGUCAGUU | 4784 |
| 826 | CCAAAAUC A UCUGUGCC | 1008 | GGCACAGA CUGAUGAGGCCGUUAGGCCGAA IAUUUUGG | 4785 |
| 829 | AAAUCAUC U GUGCCCAG | 1009 | CUGGGCAC CUGAUGAGGCCGUUAGGCCGAA IAUGAUUU | 4786 |
| 834 | AUCUGUGC C CAGCAGUG | 1010 | CACUGCUG CUGAUGAGGCCGUUAGGCCGAA ICACAGAU | 4787 |
| 835 | UCUGUGCC C AGCAGUGC | 1011 | GCACUGCU CUGAUGAGGCCGUUAGGCCGAA IGCACAGA | 4788 |
| 836 | CUGUGCCC A GCAGUGCU | 1012 | AGCACUGC CUGAUGAGGCCGUUAGGCCGAA IGGCACAG | 4789 |
| 839 | UGCCCAGC A GUGCUCCG | 1013 | CGGAGCAC CUGAUGAGGCCGUUAGGCCGAA ICUGGGCA | 4790 |
| 844 | AGCAGUGC U CCGGGCGC | 1014 | GCGCCCGG CUGAUGAGGCCGUUAGGCCGAA ICACUGCU | 4791 |
| 846 | CAGUGCUC C GGGCGCUG | 1015 | CAGCGCCC CUGAUGAGGCCGUUAGGCCGAA IAGCACUG | 4792 |
| 853 | CCGGGCGC U GCCGUGGC | 1016 | GCCACGGC CUGAUGAGGCCGUUAGGCCGAA ICGCCCGG | 4793 |
| 856 | GGCGCUGC C GUGGCAAG | 1017 | CUUGCCAC CUGAUGAGGCCGUUAGGCCGAA ICAGCGCC | 4794 |
| 862 | GCCGUGGC A AGUCCCCC | 1018 | GGGGGACU CUGAUGAGGCCGUUAGGCCGAA ICCACGGC | 4795 |
| 867 | GGCAAGUC C CCCAGUGA | 1019 | UCACUGGG CUGAUGAGGCCGUUAGGCCGAA IACUUGCC | 4796 |
| 868 | GCAAGUCC C CCAGUGAC | 1020 | GUCACUGG CUGAUGAGGCCGUUAGGCCGAA IGACUUGC | 4797 |
| 869 | CAAGUCCC C CAGUGACU | 1021 | AGUCACUG CUGAUGAGGCCGUUAGGCCGAA IGGACUUG | 4798 |
| 870 | AAGUCCCC C AGUGACUG | 1022 | CAGUCACU CUGAUGAGGCCGUUAGGCCGAA IGGGACUU | 4799 |
| 871 | AGUCCCCC A GUGACUGC | 1023 | GCAGUCAC CUGAUGAGGCCGUUAGGCCGAA IGGGGACU | 4800 |
| 877 | CCAGUGAC U GCUGCCAC | 1024 | GUGGCAGC CUGAUGAGGCCGUUAGGCCGAA IUCACUGG | 4801 |
| 880 | GUGACUGC U GCCACAAC | 1025 | GUUGUGGC CUGAUGAGGCCGUUAGGCCGAA ICAGUCAC | 4802 |
| 883 | ACUGCUGC C ACAACCAG | 1026 | CUGGUUGU CUGAUGAGGCCGUUAGGCCGAA ICAGCAGU | 4803 |
| 884 | CUGCUGCC A CAACCAGU | 1027 | ACUGGUUG CUGAUGAGGCCGUUAGGCCGAA IGCAGCAG | 4804 |
| 886 | GCUGCCAC A ACCAGUGU | 1028 | ACACUGGU CUGAUGAGGCCGUUAGGCCGAA IUGGCAGC | 4805 |
| 889 | GCCACAAC C AGUGUGCU | 1029 | AGCACACU CUGAUGAGGCCGUUAGGCCGAA IUUGUGGC | 4806 |
| 890 | CCACAACC A GUGUGCUG | 1030 | CAGCACAC CUGAUGAGGCCGUUAGGCCGAA IGUUGUGG | 4807 |
| 897 | CAGUGUGC U GCAGGCUG | 1031 | CAGCCUGC CUGAUGAGGCCGUUAGGCCGAA ICACACUG | 4808 |
| 900 | UGUGCUGC A GGCUGCAC | 1032 | GUGCAGCC CUGAUGAGGCCGUUAGGCCGAA ICAGCACA | 4809 |
| 904 | CUGCAGGC U GCACAGGC | 1033 | GCCUGUGC CUGAUGAGGCCGUUAGGCCGAA ICCUGCAG | 4810 |
| 907 | CAGGCUGC A CAGGCCCC | 1034 | GGGGCCUG CUGAUGAGGCCGUUAGGCCGAA ICAGCCUG | 4811 |
| 909 | GGCUGCAC A GGCCCCCG | 1035 | CGGGGGCC CUGAUGAGGCCGUUAGGCCGAA IUGCAGCC | 4812 |
| 913 | GCACAGGC C CCCGGGAG | 1036 | CUCCCGGG CUGAUGAGGCCGUUAGGCCGAA ICCUGUGC | 4813 |
| 914 | CACAGGCC C CCGGGAGA | 1037 | UCUCCCGG CUGAUGAGGCCGUUAGGCCGAA IGCCUGUG | 4814 |
| 915 | ACAGGCCC C CGGGAGAG | 1038 | CUCUCCCG CUGAUGAGGCCGUUAGGCCGAA IGGCCUGU | 4815 |
| 916 | CAGGCCCC C GGGAGAGC | 1039 | GCUCUCCC CUGAUGAGGCCGUUAGGCCGAA IGGGCCUG | 4816 |
| 928 | AGAGCGAC U GCCUGGUC | 1040 | GACCAGGC CUGAUGAGGCCGUUAGGCCGAA IUCGCUCU | 4817 |
| 931 | GCGACUGC C UGGUCUGC | 1041 | GCAGACCA CUGAUGAGGCCGUUAGGCCGAA ICAGUCGC | 4818 |
| 932 | CGACUGCC U GGUCUGCC | 1042 | GGCAGACC CUGAUGAGGCCGUUAGGCCGAA IGCAGUCG | 4819 |
| 937 | GCCUGGUC U GCCGCAAA | 1043 | UUUGCGGC CUGAUGAGGCCGUUAGGCCGAA IACCAGGC | 4820 |
| 940 | UGGUCUGC C GCAAAUUC | 1044 | GAAUUUGC CUGAUGAGGCCGUUAGGCCGAA ICAGACCA | 4821 |
| 943 | UCUGCCGC A AAUUCCGA | 1045 | UCGGAAUU CUGAUGAGGCCGUUAGGCCGAA ICGGCAGA | 4822 |
| 949 | GCAAAUUC C GAGACGAA | 1046 | UUCGUCUC CUGAUGAGGCCGUUAGGCCGAA IAAUUUGC | 4823 |
| 960 | GACGAAGC C ACGUGCAA | 1047 | UUGCACGU CUGAUGAGGCCGUUAGGCCGAA ICUUCGUC | 4824 |
| 961 | ACGAAGCC A CGUGCAAG | 1048 | CUUGCACG CUGAUGAGGCCGUUAGGCCGAA IGCUUCGU | 4825 |
| 967 | CCACGUGC A AGGACACC | 1049 | GGUGUCCU CUGAUGAGGCCGUUAGGCCGAA ICACGUGG | 4826 |
| 973 | GCAAGGAC A CCUGCCCC | 1050 | GGGGCAGG CUGAUGAGGCCGUUAGGCCGAA IUCCUUGC | 4827 |
| 975 | AAGGACAC C UGCCCCCC | 1051 | GGGGGGCA CUGAUGAGGCCGUUAGGCCGAA IUGUCCUU | 4828 |
| 976 | AGGACACC U GCCCCCCA | 1052 | UGGGGGGC CUGAUGAGGCCGUUAGGCCGAA IGUGUCCU | 4829 |
| 979 | ACACCUGC C CCCCACUC | 1053 | GAGUGGGG CUGAUGAGGCCGUUAGGCCGAA ICAGGUGU | 4830 |
| 980 | CACCUGCC C CCCACUCA | 1054 | UGAGUGGG CUGAUGAGGCCGUUAGGCCGAA IGCAGGUG | 4831 |
| 981 | ACCUGCCC C CCACUCAU | 1055 | AUGAGUGG CUGAUGAGGCCGUUAGGCCGAA IGGCAGGU | 4832 |
| 982 | CCUGCCCC C CACUCAUG | 1056 | CAUGAGUG CUGAUGAGGCCGUUAGGCCGAA IGGGCAGG | 4833 |
| 983 | CUGCCCCC C ACUCAUGC | 1057 | GCAUGAGU CUGAUGAGGCCGUUAGGCCGAA IGGGGCAG | 4834 |
| 984 | UGCCCCCC A CUCAUGCU | 1058 | AGCAUGAG CUGAUGAGGCCGUUAGGCCGAA IGGGGGCA | 4835 |
| 986 | CCCCCCAC U CAUGCUCU | 1059 | AGAGCAUG CUGAUGAGGCCGUUAGGCCGAA IUGGGGGG | 4836 |
| 988 | CCCCACUC A UGCUCUAC | 1060 | GUAGAGCA CUGAUGAGGCCGUUAGGCCGAA IAGUGGGG | 4837 |
| 992 | ACUCAUGC U CUACAACC | 1061 | GGUUGUAG CUGAUGAGGCCGUUAGGCCGAA ICAUGAGU | 4838 |
| 994 | UCAUGCUC U ACAACCCC | 1062 | GGGGUUGU CUGAUGAGGCCGUUAGGCCGAA IAGCAUGA | 4839 |
| 997 | UGCUCUAC A ACCCCACC | 1063 | GGUGGGGU CUGAUGAGGCCGUUAGGCCGAA IUAGAGCA | 4840 |
| 1000 | UCUACAAC C CCACCACG | 1064 | CGUGGUGG CUGAUGAGGCCGUUAGGCCGAA IUUGUAGA | 4841 |
| 1001 | CUACAACC C CACCACGU | 1065 | ACGUGGUG CUGAUGAGGCCGUUAGGCCGAA IGUUGUAG | 4842 |
| 1002 | UACAACCC C ACCACGUA | 1066 | UACGUGGU CUGAUGAGGCCGUUAGGCCGAA IGGUUGUA | 4843 |
| 1003 | ACAACCCC A CCACGUAC | 1067 | GUACGUGG CUGAUGAGGCCGUUAGGCCGAA IGGGUUGU | 4844 |
| 1005 | AACCCCAC C ACGUACCA | 1068 | UGGUACGU CUGAUGAGGCCGUUAGGCCGAA IUGGGGUU | 4845 |
| 1006 | ACCCCACC A CGUACCAG | 1069 | CUGGUACG CUGAUGAGGCCGUUAGGCCGAA IGUGGGGU | 4846 |
| 1012 | CCACGUAC C AGAUGGAU | 1070 | AUCCAUCU CUGAUGAGGCCGUUAGGCCGAA IUACGUGG | 4847 |
| 1013 | CACGUACC A GAUGGAUG | 1071 | CAUCCAUC CUGAUGAGGCCGUUAGGCCGAA IGUACGUG | 4848 |
| 1027 | AUGUGAAC C CCGAGGGC | 1072 | GCCCUCGG CUGAUGAGGCCGUUAGGCCGAA IUUCACAU | 4849 |
| 1028 | UGUGAACC C CGAGGGCA | 1073 | UGCCCUCG CUGAUGAGGCCGUUAGGCCGAA IGUUCACA | 4850 |
| 1029 | GUGAACCC C GAGGGCAA | 1074 | UUGCCCUC CUGAUGAGGCCGUUAGGCCGAA IGGUUCAC | 4851 |
| 1036 | CCGAGGGC A AAUACAGC | 1075 | GCUGUAUU CUGAUGAGGCCGUUAGGCCGAA ICCCUCGG | 4852 |
| 1042 | GCAAAUAC A GCUUUGGU | 1076 | ACCAAAGC CUGAUGAGGCCGUUAGGCCGAA IUAUUUGC | 4853 |
| 1045 | AAUACAGC U UUGGUGCC | 1077 | GGCACCAA CUGAUGAGGCCGUUAGGCCGAA ICUGUAUU | 4854 |
| 1053 | UUUGGUGC C ACCUGCGU | 1078 | ACGCAGGU CUGAUGAGGCCGUUAGGCCGAA ICACCAAA | 4855 |
| 1054 | UUGGUGCC A CCUGCGUG | 1079 | CACGCAGG CUGAUGAGGCCGUUAGGCCGAA IGCACCAA | 4856 |
| 1056 | GGUGCCAC C UGCGUGAA | 1080 | UUCACGCA CUGAUGAGGCCGUUAGGCCGAA IUGGCACC | 4857 |
| 1057 | GUGCCACC U GCGUGAAG | 1081 | CUUCACGC CUGAUGAGGCCGUUAGGCCGAA IGUGGCAC | 4858 |
| 1073 | GAAGUGUC C CCGUAAUU | 1082 | AAUUACGG CUGAUGAGGCCGUUAGGCCGAA IACACUUC | 4859 |
| 1074 | AAGUGUCC C CGUAAUUA | 1083 | UAAUUACG CUGAUGAGGCCGUUAGGCCGAA IGACACUU | 4860 |
| 1075 | AGUGUCCC C GUAAUUAU | 1084 | AUAAUUAC CUGAUGAGGCCGUUAGGCCGAA IGGACACU | 4861 |
| 1092 | GUGGUGAC A GAUCACGG | 1085 | CCGUGAUC CUGAUGAGGCCGUUAGGCCGAA IUCACCAC | 4862 |
| 1097 | GACAGAUC A CGGCUCGU | 1086 | ACGAGCCG CUGAUGAGGCCGUUAGGCCGAA IAUCUGUC | 4863 |
| 1102 | AUCACGGC U CGUGCGUC | 1087 | GACGCACG CUGAUGAGGCCGUUAGGCCGAA ICCGUGAU | 4864 |
| 1111 | CGUGCGUC C GAGCCUGU | 1088 | ACAGGCUC CUGAUGAGGCCGUUAGGCCGAA IACGCACG | 4865 |
| 1116 | GUCCGAGC C UGUGGGGC | 1089 | GCCCCACA CUGAUGAGGCCGUUAGGCCGAA ICUCGGAC | 4866 |
| 1117 | UCCGAGCC U GUGGGGCC | 1090 | GGCCCCAC CUGAUGAGGCCGUUAGGCCGAA IGCUCGGA | 4867 |
| 1125 | UGUGGGGC C GACAGCUA | 1091 | UAGCUGUC CUGAUGAGGCCGUUAGGCCGAA ICCCCACA | 4868 |
| 1129 | GGGCCGAC A GCUAUGAG | 1092 | CUCAUAGC CUGAUGAGGCCGUUAGGCCGAA IUCGGCCC | 4869 |
| 1132 | CCGACAGC U AUGAGAUG | 1093 | CAUCUCAU CUGAUGAGGCCGUUAGGCCGAA ICUGUCGG | 4870 |
| 1156 | ACGGCGUC C GCAAGUGU | 1094 | ACACUUGC CUGAUGAGGCCGUUAGGCCGAA IACGCCGU | 4871 |
| 1159 | GCGUCCGC A AGUGUAAG | 1095 | CUUACACU CUGAUGAGGCCGUUAGGCCGAA ICGGACGC | 4872 |
| 1181 | CGAAGGGC C UUGCCGCA | 1096 | UGCGGCAA CUGAUGAGGCCGUUAGGCCGAA ICCCUUCG | 4873 |
| 1182 | GAAGGGCC U UGCCGCAA | 1097 | UUGCGGCA CUGAUGAGGCCGUUAGGCCGAA IGCCCUUC | 4874 |
| 1186 | GGCCUUGC C GCAAAGUG | 1098 | CACUUUGC CUGAUGAGGCCGUUAGGCCGAA ICAAGGCC | 4875 |
| 1189 | CUUGCCGC A AAGUGUGU | 1099 | ACACACUU CUGAUGAGGCCGUUAGGCCGAA ICGGCAAG | 4876 |
| 1228 | UUAAAGAC U CACUCUCC | 1100 | GGAGAGUG CUGAUGAGGCCGUUAGGCCGAA IUCUUUAA | 4877 |
| 1230 | AAAGACUC A CUCUCCAU | 1101 | AUGGAGAG CUGAUGAGGCCGUUAGGCCGAA IAGUCUUU | 4878 |
| 1232 | AGACUCAC U CUCCAUAA | 1102 | UUAUGGAG CUGAUGAGGCCGUUAGGCCGAA IUGAGUCU | 4879 |
| 1234 | ACUCACUC U CCAUAAAU | 1103 | AUUUAUGG CUGAUGAGGCCGUUAGGCCGAA IAGUGAGU | 4880 |
| 1236 | UCACUCUC C AUAAAUGC | 1104 | GCAUUUAU CUGAUGAGGCCGUUAGGCCGAA IAGAGUGA | 4881 |
| 1237 | CACUCUCC A UAAAUGCU | 1105 | AGCAUUUA CUGAUGAGGCCGUUAGGCCGAA IGAGAGUG | 4882 |
| 1245 | AUAAAUGC U ACGAAUAU | 1106 | AUAUUCGU CUGAUGAGGCCGUUAGGCCGAA ICAUUUAU | 4883 |
| 1259 | UAUUAAAC A CUUCAAAA | 1107 | UUUUGAAG CUGAUGAGGCCGUUAGGCCGAA IUUUAAUA | 4884 |
| 1261 | UUAAACAC U UCAAAAAC | 1108 | GUUUUUGA CUGAUGAGGCCGUUAGGCCGAA IUGUUUAA | 4885 |
| 1264 | AACACUUC A AAAACUGC | 1109 | GCAGUUUU CUGAUGAGGCCGUUAGGCCGAA IAAGUGUU | 4886 |
| 1270 | UCAAAAAC U GCACCUCC | 1110 | GGAGGUGC CUGAUGAGGCCGUUAGGCCGAA IUUUUUGA | 4887 |
| 1273 | AAAACUGC A CCUCCAUC | 1111 | GAUGGAGG CUGAUGAGGCCGUUAGGCCGAA ICAGUUUU | 4888 |
| 1275 | AACUGCAC C UCCAUCAG | 1112 | CUGAUGGA CUGAUGAGGCCGUUAGGCCGAA IUGCAGUU | 4889 |
| 1276 | ACUGCACC U CCAUCAGU | 1113 | ACUGAUGG CUGAUGAGGCCGUUAGGCCGAA IGUGCAGU | 4890 |
| 1278 | UGCACCUC C AUCAGUGG | 1114 | CCACUGAU CUGAUGAGGCCGUUAGGCCGAA IAGGUGCA | 4891 |
| 1279 | GCACCUCC A UCAGUGGC | 1115 | GCCACUGA CUGAUGAGGCCGUUAGGCCGAA IGAGGUGC | 4892 |
| 1282 | CCUCCAUC A GUGGCGAU | 1116 | AUCGCCAC CUGAUGAGGCCGUUAGGCCGAA IAUGGAGG | 4893 |
| 1292 | UGGCGAUC U CCACAUCC | 1117 | GGAUGUGG CUGAUGAGGCCGUUAGGCCGAA IAUCGCCA | 4894 |
| 1294 | GCGAUCUC C ACAUCCUG | 1118 | CAGGAUGU CUGAUGAGGCCGUUAGGCCGAA IAGAUCGC | 4895 |
| 1295 | CGAUCUCC A CAUCCUGC | 1119 | GCAGGAUG CUGAUGAGGCCGUUAGGCCGAA IGAGAUCG | 4896 |
| 1297 | AUCUCCAC A UCCUGCCG | 1120 | CGGCAGGA CUGAUGAGGCCGUUAGGCCGAA IUGGAGAU | 4897 |
| 1300 | UCCACAUC C UGCCGGUG | 1121 | CACCGGCA CUGAUGAGGCCGUUAGGCCGAA IAUGUGGA | 4898 |
| 1301 | CCACAUCC U GCCGGUGG | 1122 | CCACCGGC CUGAUGAGGCCGUUAGGCCGAA IGAUGUGG | 4899 |
| 1304 | CAUCCUGC C GGUGGCAU | 1123 | AUGCCACC CUGAUGAGGCCGUUAGGCCGAA ICAGGAUG | 4900 |
| 1311 | CCGGUGGC A UUUAGGGG | 1124 | CCCCUAAA CUGAUGAGGCCGUUAGGCCGAA ICCACCGG | 4901 |
| 1324 | GGGGUGAC U CCUUCACA | 1125 | UGUGAAGG CUGAUGAGGCCGUUAGGCCGAA IUCACCCC | 4902 |
| 1326 | GGUGACUC C UUCACACA | 1126 | UGUGUGAA CUGAUGAGGCCGUUAGGCCGAA IAGUCACC | 4903 |
| 1327 | GUGACUCC U UCACACAU | 1127 | AUGUGUGA CUGAUGAGGCCGUUAGGCCGAA IGAGUCAC | 4904 |
| 1330 | ACUCCUUC A CACAUACU | 1128 | AGUAUGUG CUGAUGAGGCCGUUAGGCCGAA IAAGGAGU | 4905 |
| 1332 | UCCUUCAC A CAUACUCC | 1129 | GGAGUAUG CUGAUGAGGCCGUUAGGCCGAA IUGAAGGA | 4906 |
| 1334 | CUUCACAC A UACUCCUC | 1130 | GAGGAGUA CUGAUGAGGCCGUUAGGCCGAA IUGUGAAG | 4907 |
| 1338 | ACACAUAC U CCUCCUCU | 1131 | AGAGGAGG CUGAUGAGGCCGUUAGGCCGAA IUAUGUGU | 4908 |
| 1340 | ACAUACUC C UCCUCUGG | 1132 | CCAGAGGA CUGAUGAGGCCGUUAGGCCGAA IAGUAUGU | 4909 |
| 1341 | CAUACUCC U CCUCUGGA | 1133 | UCCAGAGG CUGAUGAGGCCGUUAGGCCGAA IGAGUAUG | 4910 |
| 1343 | UACUCCUC C UCUGGAUC | 1134 | GAUCCAGA CUGAUGAGGCCGUUAGGCCGAA IAGGAGUA | 4911 |
| 1344 | ACUCCUCC U CUGGAUCC | 1135 | GGAUCCAG CUGAUGAGGCCGUUAGGCCGAA IGAGGAGU | 4912 |
| 1346 | UCCUCCUC U GGAUCCAC | 1136 | GUGGAUCC CUGAUGAGGCCGUUAGGCCGAA IAGGAGGA | 4913 |
| 1352 | UCUGGAUC C ACAGGAAC | 1137 | GUUCCUGU CUGAUGAGGCCGUUAGGCCGAA IAUCCAGA | 4914 |
| 1353 | CUGGAUCC A CAGGAACU | 1138 | AGUUCCUG CUGAUGAGGCCGUUAGGCCGAA IGAUCCAG | 4915 |
| 1355 | GGAUCCAC A GGAACUGG | 1139 | CCAGUUCC CUGAUGAGGCCGUUAGGCCGAA IUGGAUCC | 4916 |
| 1361 | ACAGGAAC U GGAUAUUC | 1140 | GAAUAUCC CUGAUGAGGCCGUUAGGCCGAA IUUCCUGU | 4917 |
| 1370 | GGAUAUUC U GAAAACCG | 1141 | CGGUUUUC CUGAUGAGGCCGUUAGGCCGAA IAAUAUCC | 4918 |
| 1377 | CUGAAAAC C GUAAAGGA | 1142 | UCCUUUAC CUGAUGAGGCCGUUAGGCCGAA IUUUUCAG | 4919 |
| 1390 | AGGAAAUC A CAGGGUUU | 1143 | AAACCCUG CUGAUGAGGCCGUUAGGCCGAA IAUUUCCU | 4920 |
| 1392 | GAAAUCAC A GGGUUUUU | 1144 | AAAAACCC CUGAUGAGGCCGUUAGGCCGAA IUGAUUUC | 4921 |
| 1403 | GUUUUUGC U GAUUCAGG | 1145 | CCUGAAUC CUGAUGAGGCCGUUAGGCCGAA ICAAAAAC | 4922 |
| 1409 | GCUGAUUC A GGCUUGGC | 1146 | GCCAAGCC CUGAUGAGGCCGUUAGGCCGAA IAAUCAGC | 4923 |
| 1413 | AUUCAGGC U UGGCCUGA | 1147 | UCAGGCCA CUGAUGAGGCCGUUAGGCCGAA ICCUGAAU | 4924 |
| 1418 | GGCUUGGC C UGAAAACA | 1148 | UGUUUUCA CUGAUGAGGCCGUUAGGCCGAA ICCAAGCC | 4925 |
| 1419 | GCUUGGCC U GAAAACAG | 1149 | CUGUUUUC CUGAUGAGGCCGUUAGGCCGAA IGCCAAGC | 4926 |
| 1426 | CUGAAAAC A GGACGGAC | 1150 | GUCCGUCC CUGAUGAGGCCGUUAGGCCGAA IUUUUCAG | 4927 |
| 1435 | GGACGGAC C UCCAUGCC | 1151 | GGCAUGGA CUGAUGAGGCCGUUAGGCCGAA IUCCGUCC | 4928 |
| 1436 | GACGGACC U CCAUGCCU | 1152 | AGGCAUGG CUGAUGAGGCCGUUAGGCCGAA IGUCCGUC | 4929 |
| 1438 | CGGACCUC C AUGCCUUU | 1153 | AAAGGCAU CUGAUGAGGCCGUUAGGCCGAA IAGGUCCG | 4930 |
| 1439 | GGACCUCC A UGCCUUUG | 1154 | CAAAGGCA CUGAUGAGGCCGUUAGGCCGAA IGAGGUCC | 4931 |
| 1443 | CUCCAUGC C UUUGAGAA | 1155 | UUCUCAAA CUGAUGAGGCCGUUAGGCCGAA ICAUGGAG | 4932 |
| 1444 | UCCAUGCC U UUGAGAAC | 1156 | GUUCUCAA CUGAUGAGGCCGUUAGGCCGAA IGCAUGGA | 4933 |
| 1453 | UUGAGAAC C UAGAAAUC | 1157 | GAUUUCUA CUGAUGAGGCCGUUAGGCCGAA IUUCUCAA | 4934 |
| 1454 | UGAGAACC U AGAAAUCA | 1158 | UGAUUUCU CUGAUGAGGCCGUUAGGCCGAA IGUUCUCA | 4935 |
| 1462 | UAGAAAUC A UACGCGGC | 1159 | GCCGCGUA CUGAUGAGGCCGUUAGGCCGAA IAUUUCUA | 4936 |
| 1471 | UACGCGGC A GGACCAAG | 1160 | CUUGGUCC CUGAUGAGGCCGUUAGGCCGAA ICCGCGUA | 4937 |
| 1476 | GGCAGGAC C AAGCAACA | 1161 | UGUUGCUU CUGAUGAGGCCGUUAGGCCGAA IUCCUGCC | 4938 |
| 1477 | GCAGGACC A AGCAACAU | 1162 | AUGUUGCU CUGAUGAGGCCGUUAGGCCGAA IGUCCUGC | 4939 |
| 1481 | GACCAAGC A ACAUGGUC | 1163 | GACCAUGU CUGAUGAGGCCGUUAGGCCGAA ICUUGGUC | 4940 |
| 1484 | CAAGCAAC A UGGUCAGU | 1164 | ACUGACCA CUGAUGAGGCCGUUAGGCCGAA IUUGCUUG | 4941 |
| 1490 | ACAUGGUC A GUUUUCUC | 1165 | GAGAAAAC CUGAUGAGGCCGUUAGGCCGAA IACCAUGU | 4942 |
| 1497 | CAGUUUUC U CUUGCAGU | 1166 | ACUGCAAG CUGAUGAGGCCGUUAGGCCGAA IAAAACUG | 4943 |
| 1499 | GUUUUCUC U UGCAGUCG | 1167 | CGACUGCA CUGAUGAGGCCGUUAGGCCGAA IAGAAAAC | 4944 |
| 1503 | UCUCUUGC A GUCGUCAG | 1168 | CUGACGAC CUGAUGAGGCCGUUAGGCCGAA ICAAGAGA | 4945 |
| 1510 | CAGUCGUC A GCCUGAAC | 1169 | GUUCAGGC CUGAUGAGGCCGUUAGGCCGAA IACGACUG | 4946 |
| 1513 | UCGUCAGC C UGAACAUA | 1170 | UAUGUUCA CUGAUGAGGCCGUUAGGCCGAA ICUGACGA | 4947 |
| 1514 | CGUCAGCC U GAACAUAA | 1171 | UUAUGUUC CUGAUGAGGCCGUUAGGCCGAA IGCUGACG | 4948 |
| 1519 | GCCUGAAC A UAACAUCC | 1172 | GGAUGUUA CUGAUGAGGCCGUUAGGCCGAA IUUCAGGC | 4949 |
| 1524 | AACAUAAC A UCCUUGGG | 1173 | CCCAAGGA CUGAUGAGGCCGUUAGGCCGAA IUUAUGUU | 4950 |
| 1527 | AUAACAUC C UUGGGAUU | 1174 | AAUCCCAA CUGAUGAGGCCGUUAGGCCGAA IAUGUUAU | 4951 |
| 1528 | UAACAUCC U UGGGAUUA | 1175 | UAAUCCCA CUGAUGAGGCCGUUAGGCCGAA IGAUGUUA | 4952 |
| 1540 | GAUUACGC U CCCUCAAG | 1176 | CUUGAGGG CUGAUGAGGCCGUUAGGCCGAA ICGUAAUC | 4953 |
| 1542 | UUACGCUC C CUCAAGGA | 1177 | UCCUUGAG CUGAUGAGGCCGUUAGGCCGAA IAGCGUAA | 4954 |
| 1543 | UACGCUCC C UCAAGGAG | 1178 | CUCCUUGA CUGAUGAGGCCGUUAGGCCGAA IGAGCGUA | 4955 |
| 1544 | ACGCUCCC U CAAGGAGA | 1179 | UCUCCUUG CUGAUGAGGCCGUUAGGCCGAA IGGAGCGU | 4956 |
| 1546 | GCUCCCUC A AGGAGAUA | 1180 | UAUCUCCU CUGAUGAGGCCGUUAGGCCGAA IAGGGAGC | 4957 |
| 1578 | AUAAUUUC A GGAAACAA | 1181 | UUGUUUCC CUGAUGAGGCCGUUAGGCCGAA IAAAUUAU | 4958 |
| 1585 | CAGGAAAC A AAAAUUUG | 1182 | CAAAUUUU CUGAUGAGGCCGUUAGGCCGAA IUUUCCUG | 4959 |
| 1597 | AUUUGUGC U AUGCAAAU | 1183 | AUUUGCAU CUGAUGAGGCCGUUAGGCCGAA ICACAAAU | 4960 |
| 1602 | UGCUAUGC A AAUACAAU | 1184 | AUUGUAUU CUGAUGAGGCCGUUAGGCCGAA ICAUAGCA | 4961 |
| 1608 | GCAAAUAC A AUAAACUG | 1185 | CAGUUUAU CUGAUGAGGCCGUUAGGCCGAA IUAUUUGC | 4962 |
| 1615 | CAAUAAAC U GGAAAAAA | 1186 | UUUUUUCC CUGAUGAGGCCGUUAGGCCGAA IUUUAUUG | 4963 |
| 1625 | GAAAAAAC U GUUUGGGA | 1187 | UCCCAAAC CUGAUGAGGCCGUUAGGCCGAA IUUUUUUC | 4964 |
| 1635 | UUUGGGAC C UCCGGUCA | 1188 | UGACCGGA CUGAUGAGGCCGUUAGGCCGAA IUCCCAAA | 4965 |
| 1636 | UUGGGACC U CCGGUCAG | 1189 | CUGACCGG CUGAUGAGGCCGUUAGGCCGAA IGUCCCAA | 4966 |
| 1638 | GGGACCUC C GGUCAGAA | 1190 | UUCUGACC CUGAUGAGGCCGUUAGGCCGAA IAGGUCCC | 4967 |
| 1643 | CUCCGGUC A GAAAACCA | 1191 | UGGUUUUC CUGAUGAGGCCGUUAGGCCGAA IACCGGAG | 4968 |
| 1650 | CAGAAAAC C AAAAUUAU | 1192 | AUAAUUUU CUGAUGAGGCCGUUAGGCCGAA IUUUUCUG | 4969 |
| 1651 | AGAAAACC A AAAUUAUA | 1193 | UAUAAUUU CUGAUGAGGCCGUUAGGCCGAA IGUUUUCU | 4970 |
| 1663 | UUAUAAGC A ACAGAGGU | 1194 | ACCUCUGU CUGAUGAGGCCGUUAGGCCGAA ICUUAUAA | 4971 |
| 1666 | UAAGCAAC A GAGGUGAA | 1195 | UUCACCUC CUGAUGAGGCCGUUAGGCCGAA IUUGCUUA | 4972 |
| 1678 | GUGAAAAC A GCUGCAAG | 1196 | CUUGCAGC CUGAUGAGGCCGUUAGGCCGAA IUUUUCAC | 4973 |
| 1681 | AAAACAGC U GCAAGGCC | 1197 | GGCCUUGC CUGAUGAGGCCGUUAGGCCGAA ICUGUUUU | 4974 |
| 1684 | ACAGCUGC A AGGCCACA | 1198 | UGUGGCCU CUGAUGAGGCCGUUAGGCCGAA ICAGCUGU | 4975 |
| 1689 | UGCAAGGC C ACAGGCCA | 1199 | UGGCCUGU CUGAUGAGGCCGUUAGGCCGAA ICCUUGCA | 4976 |
| 1690 | GCAAGGCC A CAGGCCAG | 1200 | CUGGCCUG CUGAUGAGGCCGUUAGGCCGAA IGCCUUGC | 4977 |
| 1692 | AAGGCCAC A GGCCAGGU | 1201 | ACCUGGCC CUGAUGAGGCCGUUAGGCCGAA IUGGCCUU | 4978 |
| 1696 | CCACAGGC C AGGUCUGC | 1202 | GCAGACCU CUGAUGAGGCCGUUAGGCCGAA ICCUGUGG | 4979 |
| 1697 | CACAGGCC A GGUCUGCC | 1203 | GGCAGACC CUGAUGAGGCCGUUAGGCCGAA IGCCUGUG | 4980 |
| 1702 | GCCAGGUC U GCCAUGCC | 1204 | GGCAUGGC CUGAUGAGGCCGUUAGGCCGAA IACCUGGC | 4981 |
| 1705 | AGGUCUGC C AUGCCUUG | 1205 | CAAGGCAU CUGAUGAGGCCGUUAGGCCGAA ICAGACCU | 4982 |
| 1706 | GGUCUGCC A UGCCUUGU | 1206 | ACAAGGCA CUGAUGAGGCCGUUAGGCCGAA IGCAGACC | 4983 |
| 1710 | UGCCAUGC C UUGUGCUC | 1207 | GAGCACAA CUGAUGAGGCCGUUAGGCCGAA ICAUGGCA | 4984 |
| 1711 | GCCAUGCC U UGUGCUCC | 1208 | GGAGCACA CUGAUGAGGCCGUUAGGCCGAA IGCAUGGC | 4985 |
| 1717 | CCUUGUGC U CCCCCGAG | 1209 | CUCGGGGG CUGAUGAGGCCGUUAGGCCGAA ICACAAGG | 4986 |
| 1719 | UUGUGCUC C CCCGAGGG | 1210 | CCCUCGGG CUGAUGAGGCCGUUAGGCCGAA IAGCACAA | 4987 |
| 1720 | UGUGCUCC C CCGAGGGC | 1211 | GCCCUCGG CUGAUGAGGCCGUUAGGCCGAA IGAGCACA | 4988 |
| 1721 | GUGCUCCC C CGAGGGCU | 1212 | AGCCCUCG CUGAUGAGGCCGUUAGGCCGAA IGGAGCAC | 4989 |
| 1722 | UGCUCCCC C GAGGGCUG | 1213 | CAGCCCUC CUGAUGAGGCCGUUAGGCCGAA IGGGAGCA | 4990 |
| 1729 | CCGAGGGC U GCUGGGGC | 1214 | GCCCCAGC CUGAUGAGGCCGUUAGGCCGAA ICCCUCGG | 4991 |
| 1732 | AGGGCUGC U GGGGCCCG | 1215 | CGGGCCCC CUGAUGAGGCCGUUAGGCCGAA ICAGCCCU | 4992 |
| 1738 | GCUGGGGC C CGGAGCCC | 1216 | GGGCUCCG CUGAUGAGGCCGUUAGGCCGAA ICCCCAGC | 4993 |
| 1739 | CUGGGGCC C GGAGCCCA | 1217 | UGGGCUCC CUGAUGAGGCCGUUAGGCCGAA IGCCCCAG | 4994 |
| 1745 | CCCGGAGC C CAGGGACU | 1218 | AGUCCCUG CUGAUGAGGCCGUUAGGCCGAA ICUCCGGG | 4995 |
| 1746 | CCGGAGCC C AGGGACUG | 1219 | CAGUCCCU CUGAUGAGGCCGUUAGGCCGAA IGCUCCGG | 4996 |
| 1747 | CGGAGCCC A GGGACUGC | 1220 | GCAGUCCC CUGAUGAGGCCGUUAGGCCGAA IGGCUCCG | 4997 |
| 1753 | CCAGGGAC U GCGUCUCU | 1221 | AGAGACGC CUGAUGAGGCCGUUAGGCCGAA IUCCCUGG | 4998 |
| 1759 | ACUGCGUC U CUUGCCGG | 1222 | CCGGCAAG CUGAUGAGGCCGUUAGGCCGAA IACGCAGU | 4999 |
| 1761 | UGCGUCUC U UGCCGGAA | 1223 | UUCCGGCA CUGAUGAGGCCGUUAGGCCGAA IAGACGCA | 5000 |
| 1765 | UCUCUUGC C GGAAUGUC | 1224 | GACAUUCC CUGAUGAGGCCGUUAGGCCGAA ICAAGAGA | 5001 |
| 1774 | GGAAUGUC A GCCGAGGC | 1225 | GCCUCGGC CUGAUGAGGCCGUUAGGCCGAA IACAUUCC | 5002 |
| 1777 | AUGUCAGC C GAGGCAGG | 1226 | CCUGCCUC CUGAUGAGGCCGUUAGGCCGAA ICUGACAU | 5003 |
| 1783 | GCCGAGGC A GGGAAUGC | 1227 | GCAUUCCC CUGAUGAGGCCGUUAGGCCGAA ICCUCGGC | 5004 |
| 1798 | GCGUGGAC A AGUGCAAG | 1228 | CUUGCACU CUGAUGAGGCCGUUAGGCCGAA IUCCACGC | 5005 |
| 1804 | ACAAGUGC A AGCUUCUG | 1229 | CAGAAGCU CUGAUGAGGCCGUUAGGCCGAA ICACUUGU | 5006 |
| 1808 | GUGCAAGC U UCUGGAGG | 1230 | CCUCCAGA CUGAUGAGGCCGUUAGGCCGAA ICUUGCAC | 5007 |
| 1811 | CAAGCUUC U GGAGGGUG | 1231 | CACCCUCC CUGAUGAGGCCGUUAGGCCGAA IAAGCUUG | 5008 |
| 1823 | GGGUGAGC C AAGGGAGU | 1232 | ACUCCCUU CUGAUGAGGCCGUUAGGCCGAA ICUCACCC | 5009 |
| 1824 | GGUGAGCC A AGGGAGUU | 1233 | AACUCCCU CUGAUGAGGCCGUUAGGCCGAA IGCUCACC | 5010 |
| 1843 | UGGAGAAC U CUGAGUGC | 1234 | GCACUCAG CUGAUGAGGCCGUUAGGCCGAA IUUCUCCA | 5011 |
| 1845 | GAGAACUC U GAGUGCAU | 1235 | AUGCACUC CUGAUGAGGCCGUUAGGCCGAA IAGUUCUC | 5012 |
| 1852 | CUGAGUGC A UACAGUGC | 1236 | GCACUGUA CUGAUGAGGCCGUUAGGCCGAA ICACUCAG | 5013 |
| 1856 | GUGCAUAC A GUGCCACC | 1237 | GGUGGCAC CUGAUGAGGCCGUUAGGCCGAA IUAUGCAC | 5014 |
| 1861 | UACAGUGC C ACCCAGAG | 1238 | CUCUGGGU CUGAUGAGGCCGUUAGGCCGAA ICACUGUA | 5015 |
| 1862 | ACAGUGCC A CCCAGAGU | 1239 | ACUCUGGG CUGAUGAGGCCGUUAGGCCGAA IGCACUGU | 5016 |
| 1864 | AGUGCCAC C CAGAGUGC | 1240 | GCACUCUG CUGAUGAGGCCGUUAGGCCGAA IUGGCACU | 5017 |
| 1865 | GUGCCACC C AGAGUGCC | 1241 | GGCACUCU CUGAUGAGGCCGUUAGGCCGAA IGUGGCAC | 5018 |
| 1866 | UGCCACCC A GAGUGCCU | 1242 | AGGCACUC CUGAUGAGGCCGUUAGGCCGAA IGGUGGCA | 5019 |
| 1873 | CAGAGUGC C UGCCUCAG | 1243 | CUGAGGCA CUGAUGAGGCCGUUAGGCCGAA ICACUCUG | 5020 |
| 1874 | AGAGUGCC U GCCUCAGG | 1244 | CCUGAGGC CUGAUGAGGCCGUUAGGCCGAA IGCACUCU | 5021 |
| 1877 | GUGCCUGC C UCAGGCCA | 1245 | UGGCCUGA CUGAUGAGGCCGUUAGGCCGAA ICAGGCAC | 5022 |
| 1878 | UGCCUGCC U CAGGCCAU | 1246 | AUGGCCUG CUGAUGAGGCCGUUAGGCCGAA IGCAGGCA | 5023 |
| 1880 | CCUGCCUC A GGCCAUGA | 1247 | UCAUGGCC CUGAUGAGGCCGUUAGGCCGAA IAGGCAGG | 5024 |
| 1884 | CCUCAGGC C AUGAACAU | 1248 | AUGUUCAU CUGAUGAGGCCGUUAGGCCGAA ICCUGAGG | 5025 |
| 1885 | CUCAGGCC A UGAACAUC | 1249 | GAUGUUCA CUGAUGAGGCCGUUAGGCCGAA IGCCUGAG | 5026 |
| 1891 | CCAUGAAC A UCACCUGC | 1250 | GCAGGUGA CUGAUGAGGCCGUUAGGCCGAA IUUCAUGG | 5027 |
| 1894 | UGAACAUC A CCUGCACA | 1251 | UGUGCAGG CUGAUGAGGCCGUUAGGCCGAA IAUGUUCA | 5028 |
| 1896 | AACAUCAC C UGCACAGG | 1252 | CCUGUGCA CUGAUGAGGCCGUUAGGCCGAA IUGAUGUU | 5029 |
| 1897 | ACAUCACC U GCACAGGA | 1253 | UCCUGUGC CUGAUGAGGCCGUUAGGCCGAA IGUGAUGU | 5030 |
| 1900 | UCACCUGC A CAGGACGG | 1254 | CCGUCCUG CUGAUGAGGCCGUUAGGCCGAA ICAGGUGA | 5031 |
| 1902 | ACCUGCAC A GGACGGGG | 1255 | CCCCGUCC CUGAUGAGGCCGUUAGGCCGAA IUGCAGGU | 5032 |
| 1913 | ACGGGGAC C AGACAACU | 1256 | AGUUGUCU CUGAUGAGGCCGUUAGGCCGAA IUCCCCGU | 5033 |
| 1914 | CGGGGACC A GACAACUG | 1257 | CAGUUGUC CUGAUGAGGCCGUUAGGCCGAA IGUCCCCG | 5034 |
| 1918 | GACCAGAC A ACUGUAUC | 1258 | GAUACAGU CUGAUGAGGCCGUUAGGCCGAA IUCUGGUC | 5035 |
| 1921 | CAGACAAC U GUAUCCAG | 1259 | CUGGAUAC CUGAUGAGGCCGUUAGGCCGAA IUUGUCUG | 5036 |
| 1927 | ACUGUAUC C AGUGUGCC | 1260 | GGCACACU CUGAUGAGGCCGUUAGGCCGAA IAUACAGU | 5037 |
| 1928 | CUGUAUCC A GUGUGCCC | 1261 | GGGCACAC CUGAUGAGGCCGUUAGGCCGAA IGAUACAG | 5038 |
| 1935 | CAGUGUGC C CACUACAU | 1262 | AUGUAGUG CUGAUGAGGCCGUUAGGCCGAA ICACACUG | 5039 |
| 1936 | AGUGUGCC C ACUACAUU | 1263 | AAUGUAGU CUGAUGAGGCCGUUAGGCCGAA IGCACACU | 5040 |
| 1937 | GUGUGCCC A CUACAUUG | 1264 | CAAUGUAG CUGAUGAGGCCGUUAGGCCGAA IGGCACAC | 5041 |
| 1939 | GUGCCCAC U ACAUUGAC | 1265 | GUCAAUGU CUGAUGAGGCCGUUAGGCCGAA IUGGGCAC | 5042 |
| 1942 | CCCACUAC A UUGACGGC | 1266 | GCCGUCAA CUGAUGAGGCCGUUAGGCCGAA IUAGUGGG | 5043 |
| 1951 | UUGACGGC C CCCACUGC | 1267 | GCAGUGGG CUGAUGAGGCCGUUAGGCCGAA ICCGUCAA | 5044 |
| 1952 | UGACGGCC C CCACUGCG | 1268 | CGCAGUGG CUGAUGAGGCCGUUAGGCCGAA IGCCGUCA | 5045 |
| 1953 | GACGGCCC C CACUGCGU | 1269 | ACGCAGUG CUGAUGAGGCCGUUAGGCCGAA IGGCCGUC | 5046 |
| 1954 | ACGGCCCC C ACUGCGUC | 1270 | GACGCAGU CUGAUGAGGCCGUUAGGCCGAA IGGGCCGU | 5047 |
| 1955 | CGGCCCCC A CUGCGUCA | 1271 | UGACGCAG CUGAUGAGGCCGUUAGGCCGAA IGGGGCCG | 5048 |
| 1957 | GCCCCCAC U GCGUCAAG | 1272 | CUUGACGC CUGAUGAGGCCGUUAGGCCGAA IUGGGGGC | 5049 |
| 1963 | ACUGCGUC A AGACCUGC | 1273 | GCAGGUCU CUGAUGAGGCCGUUAGGCCGAA IACGCAGU | 5050 |
| 1968 | GUCAAGAC C UGCCCGGC | 1274 | GCCGGGCA CUGAUGAGGCCGUUAGGCCGAA IUCUUGAC | 5051 |
| 1969 | UCAAGACC U GCCCGGCA | 1275 | UGCCGGGC CUGAUGAGGCCGUUAGGCCGAA IGUCUUGA | 5052 |
| 1972 | AGACCUGC C CGGCAGGA | 1276 | UCCUGCCG CUGAUGAGGCCGUUAGGCCGAA ICAGGUCU | 5053 |
| 1973 | GACCUGCC C GGCAGGAG | 1277 | CUCCUGCC CUGAUGAGGCCGUUAGGCCGAA IGCAGGUC | 5054 |
| 1977 | UGCCCGGC A GGAGUCAU | 1278 | AUGACUCC CUGAUGAGGCCGUUAGGCCGAA ICCGGGCA | 5055 |
| 1984 | CAGGAGUC A UGGGAGAA | 1279 | UUCUCCCA CUGAUGAGGCCGUUAGGCCGAA IACUCCUG | 5056 |
| 1996 | GAGAAAAC A ACACCCUG | 1280 | CAGGGUGU CUGAUGAGGCCGUUAGGCCGAA IUUUUCUC | 5057 |
| 1999 | AAAACAAC A CCCUGGUC | 1281 | GACCAGGG CUGAUGAGGCCGUUAGGCCGAA IUUGUUUU | 5058 |
| 2001 | AACAACAC C CUGGUCUG | 1282 | CAGACCAG CUGAUGAGGCCGUUAGGCCGAA IUGUUGUU | 5059 |
| 2002 | ACAACACC C UGGUCUGG | 1283 | CCAGACCA CUGAUGAGGCCGUUAGGCCGAA IGUGUUGU | 5060 |
| 2003 | CAACACCC U GGUCUGGA | 1284 | UCCAGACC CUGAUGAGGCCGUUAGGCCGAA IGGUGUUG | 5061 |
| 2008 | CCCUGGUC U GGAAGUAC | 1285 | GUACUUCC CUGAUGAGGCCGUUAGGCCGAA IACCAGGG | 5062 |
| 2019 | AAGUACGC A GACGCCGG | 1286 | CCGGCGUC CUGAUGAGGCCGUUAGGCCGAA ICGUACUU | 5063 |
| 2025 | GCAGACGC C GGCCAUGU | 1287 | ACAUGGCC CUGAUGAGGCCGUUAGGCCGAA ICGUCUGC | 5064 |
| 2029 | ACGCCGGC C AUGUGUGC | 1288 | GCACACAU CUGAUGAGGCCGUUAGGCCGAA ICCGGCGU | 5065 |
| 2030 | CGCCGGCC A UGUGUGCC | 1289 | GGCACACA CUGAUGAGGCCGUUAGGCCGAA IGCCGGCG | 5066 |
| 2038 | AUGUGUGC C ACCUGUGC | 1290 | GCACAGGU CUGAUGAGGCCGUUAGGCCGAA ICACACAU | 5067 |
| 2039 | UGUGUGCC A CCUGUGCC | 1291 | GGCACAGG CUGAUGAGGCCGUUAGGCCGAA IGCACACA | 5068 |
| 2041 | UGUGCCAC C UGUGCCAU | 1292 | AUGGCACA CUGAUGAGGCCGUUAGGCCGAA IUGGCACA | 5069 |
| 2042 | GUGCCACC U GUGCCAUC | 1293 | GAUGGCAC CUGAUGAGGCCGUUAGGCCGAA IGUGGCAC | 5070 |
| 2047 | ACCUGUGC C AUCCAAAC | 1294 | GUUUGGAU CUGAUGAGGCCGUUAGGCCGAA ICACAGGU | 5071 |
| 2048 | CCUGUGCC A UCCAAACU | 1295 | AGUUUGGA CUGAUGAGGCCGUUAGGCCGAA IGCACAGG | 5072 |
| 2051 | GUGCCAUC C AAACUGCA | 1296 | UGCAGUUU CUGAUGAGGCCGUUAGGCCGAA IAUGGCAC | 5073 |
| 2052 | UGCCAUCC A AACUGCAC | 1297 | GUGCAGUU CUGAUGAGGCCGUUAGGCCGAA IGAUGGCA | 5074 |
| 2056 | AUCCAAAC U GCACCUAC | 1298 | GUAGGUGC CUGAUGAGGCCGUUAGGCCGAA IUUUGGAU | 5075 |
| 2059 | CAAACUGC A CCUACGGA | 1299 | UCCGUAGG CUGAUGAGGCCGUUAGGCCGAA ICAGUUUG | 5076 |
| 2061 | AACUGCAC C UACGGAUG | 1300 | CAUCCGUA CUGAUGAGGCCGUUAGGCCGAA IUGCAGUU | 5077 |
| 2062 | ACUGCACC U ACGGAUGC | 1301 | GCAUCCGU CUGAUGAGGCCGUUAGGCCGAA IGUGCAGU | 5078 |
| 2071 | ACGGAUGC A CUGGGCCA | 1302 | UGGCCCAG CUGAUGAGGCCGUUAGGCCGAA ICAUCCGU | 5079 |
| 2073 | GGAUGCAC U GGGCCAGG | 1303 | CCUGGCCC CUGAUGAGGCCGUUAGGCCGAA IUGCAUCC | 5080 |
| 2078 | CACUGGGC C AGGUCUUG | 1304 | CAAGACCU CUGAUGAGGCCGUUAGGCCGAA ICCCAGUG | 5081 |
| 2079 | ACUGGGCC A GGUCUUGA | 1305 | UCAAGACC CUGAUGAGGCCGUUAGGCCGAA IGCCCAGU | 5082 |
| 2084 | GCCAGGUC U UGAAGGCU | 1306 | AGCCUUCA CUGAUGAGGCCGUUAGGCCGAA IACCUGGC | 5083 |
| 2092 | UUGAAGGC U GUCCAACG | 1307 | CGUUGGAC CUGAUGAGGCCGUUAGGCCGAA ICCUUCAA | 5084 |
| 2096 | AGGCUGUC C AACGAAUG | 1308 | CAUUCGUU CUGAUGAGGCCGUUAGGCCGAA IACAGCCU | 5085 |
| 2097 | GGCUGUCC A ACGAAUGG | 1309 | CCAUUCGU CUGAUGAGGCCGUUAGGCCGAA IGACAGCC | 5086 |
| 2108 | GAAUGGGC C UAAGAUCC | 1310 | GGAUCUUA CUGAUGAGGCCGUUAGGCCGAA ICCCAUUC | 5087 |
| 2109 | AAUGGGCC U AAGAUCCC | 1311 | GGGAUCUU CUGAUGAGGCCGUUAGGCCGAA IGCCCAUU | 5088 |
| 2116 | CUAAGAUC C CGUCCAUC | 1312 | GAUGGACG CUGAUGAGGCCGUUAGGCCGAA IAUCUUAG | 5089 |
| 2117 | UAAGAUCC C GUCCAUCG | 1313 | CGAUGGAC CUGAUGAGGCCGUUAGGCCGAA IGAUCUUA | 5090 |
| 2121 | AUCCCGUC C AUCGCCAC | 1314 | GUGGCGAU CUGAUGAGGCCGUUAGGCCGAA IACGGGAU | 5091 |
| 2122 | UCCCGUCC A UCGCCACU | 1315 | AGUGGCGA CUGAUGAGGCCGUUAGGCCGAA IGACGGGA | 5092 |
| 2127 | UCCAUCGC C ACUGGGAU | 1316 | AUCCCAGU CUGAUGAGGCCGUUAGGCCGAA ICGAUGGA | 5093 |
| 2128 | CCAUCGCC A CUGGGAUG | 1317 | CAUCCCAG CUGAUGAGGCCGUUAGGCCGAA IGCGAUGG | 5094 |
| 2130 | AUCGCCAC U GGGAUGGU | 1318 | ACCAUCCC CUGAUGAGGCCGUUAGGCCGAA IUGGCGAU | 5095 |
| 2145 | GUGGGGGC C CUCCUCUU | 1319 | AAGAGGAG CUGAUGAGGCCGUUAGGCCGAA ICCCCCAC | 5096 |
| 2146 | UGGGGGCC C UCCUCUUG | 1320 | CAAGAGGA CUGAUGAGGCCGUUAGGCCGAA IGCCCCCA | 5097 |
| 2147 | GGGGGCCC U CCUCUUGC | 1321 | GCAAGAGG CUGAUGAGGCCGUUAGGCCGAA IGGCCCCC | 5098 |
| 2149 | GGGCCCUC C UCUUGCUG | 1322 | CAGCAAGA CUGAUGAGGCCGUUAGGCCGAA IAGGGCCC | 5099 |
| 2150 | GGCCCUCC U CUUGCUGC | 1323 | GCAGCAAG CUGAUGAGGCCGUUAGGCCGAA IGAGGGCC | 5100 |
| 2152 | CCCUCCUC U UGCUGCUG | 1324 | CAGCAGCA CUGAUGAGGCCGUUAGGCCGAA IAGGAGGG | 5101 |
| 2156 | CCUCUUGC U GCUGGUGG | 1325 | CCACCAGC CUGAUGAGGCCGUUAGGCCGAA ICAAGAGG | 5102 |
| 2159 | CUUGCUGC U GGUGGUGG | 1326 | CCACCACC CUGAUGAGGCCGUUAGGCCGAA ICAGCAAG | 5103 |
| 2169 | GUGGUGGC C CUGGGGAU | 1327 | AUCCCCAG CUGAUGAGGCCGUUAGGCCGAA ICCACCAC | 5104 |
| 2170 | UGGUGGCC C UGGGGAUC | 1328 | GAUCCCCA CUGAUGAGGCCGUUAGGCCGAA IGCCACCA | 5105 |
| 2171 | GGUGGCCC U GGGGAUCG | 1329 | CGAUCCCC CUGAUGAGGCCGUUAGGCCGAA IGGCCACC | 5106 |
| 2182 | GGAUCGGC C UCUUCAUG | 1330 | CAUGAAGA CUGAUGAGGCCGUUAGGCCGAA ICCGAUCC | 5107 |
| 2183 | GAUCGGCC U CUUCAUGC | 1331 | GCAUGAAG CUGAUGAGGCCGUUAGGCCGAA IGCCGAUC | 5108 |
| 2185 | UCGGCCUC U UCAUGCGA | 1332 | UCGCAUGA CUGAUGAGGCCGUUAGGCCGAA IAGGCCGA | 5109 |
| 2188 | GCCUCUUC A UGCGAAGG | 1333 | CCUUCGCA CUGAUGAGGCCGUUAGGCCGAA IAAGAGGC | 5110 |
| 2200 | GAAGGCGC C ACAUCGUU | 1334 | AACGAUGU CUGAUGAGGCCGUUAGGCCGAA ICGCCUUC | 5111 |
| 2201 | AAGGCGCC A CAUCGUUC | 1335 | GAACGAUG CUGAUGAGGCCGUUAGGCCGAA IGCGCCUU | 5112 |
| 2203 | GGCGCCAC A UCGUUCGG | 1336 | CCGAACGA CUGAUGAGGCCGUUAGGCCGAA IUGGCGCC | 5113 |
| 2218 | GGAAGCGC A CGCUGCGG | 1337 | CCGCAGCG CUGAUGAGGCCGUUAGGCCGAA ICGCUUCC | 5114 |
| 2222 | GCGCACGC U GCGGAGGC | 1338 | GCCUCCGC CUGAUGAGGCCGUUAGGCCGAA ICGUGCGC | 5115 |
| 2231 | GCGGAGGC U GCUGCAGG | 1339 | CCUGCAGC CUGAUGAGGCCGUUAGGCCGAA ICCUCCGC | 5116 |
| 2234 | GAGGCUGC U GCAGGAGA | 1340 | UCUCCUGC CUGAUGAGGCCGUUAGGCCGAA ICAGCCUC | 5117 |
| 2237 | GCUGCUGC A GGAGAGGG | 1341 | CCCUCUCC CUGAUGAGGCCGUUAGGCCGAA ICAGCAGC | 5118 |
| 2249 | GAGGGAGC U UGUGGAGC | 1342 | GCUCCACA CUGAUGAGGCCGUUAGGCCGAA ICUCCCUC | 5119 |
| 2258 | UGUGGAGC C UCUUACAC | 1343 | GUGUAAGA CUGAUGAGGCCGUUAGGCCGAA ICUCCACA | 5120 |
| 2259 | GUGGAGCC U CUUACACC | 1344 | GGUGUAAG CUGAUGAGGCCGUUAGGCCGAA IGCUCCAC | 5121 |
| 2261 | GGAGCCUC U UACACCCA | 1345 | UGGGUGUA CUGAUGAGGCCGUUAGGCCGAA IAGGCUCC | 5122 |
| 2265 | CCUCUUAC A CCCAGUGG | 1346 | CCACUGGG CUGAUGAGGCCGUUAGGCCGAA IUAAGAGG | 5123 |
| 2267 | UCUUACAC C CAGUGGAG | 1347 | CUCCACUG CUGAUGAGGCCGUUAGGCCGAA IUGUAAGA | 5124 |
| 2268 | CUUACACC C AGUGGAGA | 1348 | UCUCCACU CUGAUGAGGCCGUUAGGCCGAA IGUGUAAG | 5125 |
| 2269 | UUACACCC A GUGGAGAA | 1349 | UUCUCCAC CUGAUGAGGCCGUUAGGCCGAA IGGUGUAA | 5126 |
| 2280 | GGAGAAGC U CCCAACCA | 1350 | UGGUUGGG CUGAUGAGGCCGUUAGGCCGAA ICUUCUCC | 5127 |
| 2282 | AGAAGCUC C CAACCAAG | 1351 | CUUGGUUG CUGAUGAGGCCGUUAGGCCGAA IAGCUUCU | 5128 |
| 2283 | GAAGCUCC C AACCAAGC | 1352 | GCUUGGUU CUGAUGAGGCCGUUAGGCCGAA IGAGCUUC | 5129 |
| 2284 | AAGCUCCC A ACCAAGCU | 1353 | AGCUUGGU CUGAUGAGGCCGUUAGGCCGAA IGGAGCUU | 5130 |
| 2287 | CUCCCAAC C AAGCUCUC | 1354 | GAGAGCUU CUGAUGAGGCCGUUAGGCCGAA IUUGGGAG | 5131 |
| 2288 | UCCCAACC A AGCUCUCU | 1355 | AGAGAGCU CUGAUGAGGCCGUUAGGCCGAA IGUUGGGA | 5132 |
| 2292 | AACCAAGC U CUCUUGAG | 1356 | CUCAAGAG CUGAUGAGGCCGUUAGGCCGAA ICUUGGUU | 5133 |
| 2294 | CCAAGCUC U CUUGAGGA | 1357 | UCCUCAAG CUGAUGAGGCCGUUAGGCCGAA IAGCUUGG | 5134 |
| 2296 | AAGCUCUC U UGAGGAUC | 1358 | GAUCCUCA CUGAUGAGGCCGUUAGGCCGAA IAGAGCUU | 5135 |
| 2305 | UGAGGAUC U UGAAGGAA | 1359 | UUCCUUCA CUGAUGAGGCCGUUAGGCCGAA IAUCCUCA | 5136 |
| 2316 | AAGGAAAC U GAAUUCAA | 1360 | UUGAAUUC CUGAUGAGGCCGUUAGGCCGAA IUUUCCUU | 5137 |
| 2323 | CUGAAUUC A AAAAGAUC | 1361 | GAUCUUUU CUGAUGAGGCCGUUAGGCCGAA IAAUUCAG | 5138 |
| 2332 | AAAAGAUC A AAGUGCUG | 1362 | CAGCACUU CUGAUGAGGCCGUUAGGCCGAA IAUCUUUU | 5139 |
| 2339 | CAAAGUGC U GGGCUCCG | 1363 | CGGAGCCC CUGAUGAGGCCGUUAGGCCGAA ICACUUUG | 5140 |
| 2344 | UGCUGGGC U CCGGUGCG | 1364 | CGCACCGG CUGAUGAGGCCGUUAGGCCGAA ICCCAGCA | 5141 |
| 2346 | CUGGGCUC C GGUGCGUU | 1365 | AACGCACC CUGAUGAGGCCGUUAGGCCGAA IAGCCCAG | 5142 |
| 2359 | CGUUCGGC A CGGUGUAU | 1366 | AUACACCG CUGAUGAGGCCGUUAGGCCGAA ICCGAACG | 5143 |
| 2375 | UAAGGGAC U CUGGAUCC | 1367 | GGAUCCAG CUGAUGAGGCCGUUAGGCCGAA IUCCCUUA | 5144 |
| 2377 | AGGGACUC U GGAUCCCA | 1368 | UGGGAUCC CUGAUGAGGCCGUUAGGCCGAA IAGUCCCU | 5145 |
| 2383 | UCUGGAUC C CAGAAGGU | 1369 | ACCUUCUG CUGAUGAGGCCGUUAGGCCGAA IAUCCAGA | 5146 |
| 2384 | CUGGAUCC C AGAAGGUG | 1370 | CACCUUCU CUGAUGAGGCCGUUAGGCCGAA IGAUCCAG | 5147 |
| 2385 | UGGAUCCC A GAAGGUGA | 1371 | UCACCUUC CUGAUGAGGCCGUUAGGCCGAA IGGAUCCA | 5148 |
| 2408 | UAAAAUUC C CGUCGCUA | 1372 | UAGCGACG CUGAUGAGGCCGUUAGGCCGAA IAAUUUUA | 5149 |
| 2409 | AAAAUUCC C GUCGCUAU | 1373 | AUAGCGAC CUGAUGAGGCCGUUAGGCCGAA IGAAUUUU | 5150 |
| 2415 | CCCGUCGC U AUCAAGGA | 1374 | UCCUUGAU CUGAUGAGGCCGUUAGGCCGAA ICGACGGG | 5151 |
| 2419 | UCGCUAUC A AGGAAUUA | 1375 | UAAUUCCU CUGAUGAGGCCGUUAGGCCGAA IAUAGCGA | 5152 |
| 2436 | AGAGAAGC A ACAUCUCC | 1376 | GGAGAUGU CUGAUGAGGCCGUUAGGCCGAA ICUUCUCU | 5153 |
| 2439 | GAAGCAAC A UCUCCGAA | 1377 | UUCGGAGA CUGAUGAGGCCGUUAGGCCGAA IUUGCUUC | 5154 |
| 2442 | GCAACAUC U CCGAAAGC | 1378 | GCUUUCGG CUGAUGAGGCCGUUAGGCCGAA IAUGUUGC | 5155 |
| 2444 | AACAUCUC C GAAAGCCA | 1379 | UGGCUUUC CUGAUGAGGCCGUUAGGCCGAA IAGAUGUU | 5156 |
| 2451 | CCGAAAGC C AACAAGGA | 1380 | UCCUUGUU CUGAUGAGGCCGUUAGGCCGAA ICUUUCGG | 5157 |
| 2452 | CGAAAGCC A ACAAGGAA | 1381 | UUCCUUGU CUGAUGAGGCCGUUAGGCCGAA IGCUUUCG | 5158 |
| 2455 | AAGCCAAC A AGGAAAUC | 1382 | GAUUUCCU CUGAUGAGGCCGUUAGGCCGAA IUUGGCUU | 5159 |
| 2464 | AGGAAAUC C UCGAUGAA | 1383 | UUCAUCGA CUGAUGAGGCCGUUAGGCCGAA IAUUUCCU | 5160 |
| 2465 | GGAAAUCC U CGAUGAAG | 1384 | CUUCAUCG CUGAUGAGGCCGUUAGGCCGAA IGAUUUCC | 5161 |
| 2475 | GAUGAAGC C UACGUGAU | 1385 | AUCACGUA CUGAUGAGGCCGUUAGGCCGAA ICUUCAUC | 5162 |
| 2476 | AUGAAGCC U ACGUGAUG | 1386 | CAUCACGU CUGAUGAGGCCGUUAGGCCGAA IGCUUCAU | 5163 |
| 2487 | GUGAUGGC C AGCGUGGA | 1387 | UCCACGCU CUGAUGAGGCCGUUAGGCCGAA ICCAUCAC | 5164 |
| 2488 | UGAUGGCC A GCGUGGAC | 1388 | GUCCACGC CUGAUGAGGCCGUUAGGCCGAA IGCCAUCA | 5165 |
| 2497 | GCGUGGAC A ACCCCCAC | 1389 | GUGGGGGU CUGAUGAGGCCGUUAGGCCGAA IUCCACGC | 5166 |
| 2500 | UGGACAAC C CCCACGUG | 1390 | CACGUGGG CUGAUGAGGCCGUUAGGCCGAA IUUGUCCA | 5167 |
| 2501 | GGACAACC C CCACGUGU | 1391 | ACACGUGG CUGAUGAGGCCGUUAGGCCGAA IGUUGUCC | 5168 |
| 2502 | GACAACCC C CACGUGUG | 1392 | CACACGUG CUGAUGAGGCCGUUAGGCCGAA IGGUUGUC | 5169 |
| 2503 | ACAACCCC C ACGUGUGC | 1393 | GCACACGU CUGAUGAGGCCGUUAGGCCGAA IGGGUUGU | 5170 |
| 2504 | CAACCCCC A CGUGUGCC | 1394 | GGCACACG CUGAUGAGGCCGUUAGGCCGAA IGGGGUUG | 5171 |
| 2512 | ACGUGUGC C GCCUGCUG | 1395 | CAGCAGGC CUGAUGAGGCCGUUAGGCCGAA ICACACGU | 5172 |
| 2515 | UGUGCCGC C UGCUGGGC | 1396 | GCCCAGCA CUGAUGAGGCCGUUAGGCCGAA ICGGCACA | 5173 |
| 2516 | GUGCCGCC U GCUGGGCA | 1397 | UGCCCAGC CUGAUGAGGCCGUUAGGCCGAA IGCGGCAC | 5174 |
| 2519 | CCGCCUGC U GGGCAUCU | 1398 | AGAUGCCC CUGAUGAGGCCGUUAGGCCGAA ICAGGCGG | 5175 |
| 2524 | UGCUGGGC A UCUGCCUC | 1399 | GAGGCAGA CUGAUGAGGCCGUUAGGCCGAA ICCCAGCA | 5176 |
| 2527 | UGGGCAUC U GCCUCACC | 1400 | GGUGAGGC CUGAUGAGGCCGUUAGGCCGAA IAUGCCCA | 5177 |
| 2530 | GCAUCUGC C UCACCUCC | 1401 | GGAGGUGA CUGAUGAGGCCGUUAGGCCGAA ICAGAUGC | 5178 |
| 2531 | CAUCUGCC U CACCUCCA | 1402 | UGGAGGUG CUGAUGAGGCCGUUAGGCCGAA IGCAGAUG | 5179 |
| 2533 | UCUGCCUC A CCUCCACC | 1403 | GGUGGAGG CUGAUGAGGCCGUUAGGCCGAA IAGGCAGA | 5180 |
| 2535 | UGCCUCAC C UCCACCGU | 1404 | ACGGUGGA CUGAUGAGGCCGUUAGGCCGAA IUGAGGCA | 5181 |
| 2536 | GCCUCACC U CCACCGUG | 1405 | CACGGUGG CUGAUGAGGCCGUUAGGCCGAA IGUGAGGC | 5182 |
| 2538 | CUCACCUC C ACCGUGCA | 1406 | UGCACGGU CUGAUGAGGCCGUUAGGCCGAA IAGGUGAG | 5183 |
| 2539 | UCACCUCC A CCGUGCAA | 1407 | UUGCACGG CUGAUGAGGCCGUUAGGCCGAA IGAGGUGA | 5184 |
| 2541 | ACCUCCAC C GUGCAACU | 1408 | AGUUGCAC CUGAUGAGGCCGUUAGGCCGAA IUGGAGGU | 5185 |
| 2546 | CACCGUGC A ACUCAUCA | 1409 | UGAUGAGU CUGAUGAGGCCGUUAGGCCGAA ICACGGUG | 5186 |
| 2549 | CGUGCAAC U CAUCACGC | 1410 | GCGUGAUG CUGAUGAGGCCGUUAGGCCGAA IUUGCACG | 5187 |
| 2551 | UGCAACUC A UCACGCAG | 1411 | CUGCGUGA CUGAUGAGGCCGUUAGGCCGAA IAGUUGCA | 5188 |
| 2554 | AACUCAUC A CGCAGCUC | 1412 | GAGCUGCG CUGAUGAGGCCGUUAGGCCGAA IAUGAGUU | 5189 |
| 2558 | CAUCACGC A GCUCAUGC | 1413 | GCAUGAGC CUGAUGAGGCCGUUAGGCCGAA ICGUGAUG | 5190 |
| 2561 | CACGCAGC U CAUGCCCU | 1414 | AGGGCAUG CUGAUGAGGCCGUUAGGCCGAA ICUGCGUG | 5191 |
| 2563 | CGCAGCUC A UGCCCUUC | 1415 | GAAGGGCA CUGAUGAGGCCGUUAGGCCGAA IAGCUGCG | 5192 |
| 2567 | GCUCAUGC C CUUCGGCU | 1416 | AGCCGAAG CUGAUGAGGCCGUUAGGCCGAA ICAUGAGC | 5193 |
| 2568 | CUCAUGCC C UUCGGCUG | 1417 | CAGCCGAA CUGAUGAGGCCGUUAGGCCGAA IGCAUGAG | 5194 |
| 2569 | UCAUGCCC U UCGGCUGC | 1418 | GCAGCCGA CUGAUGAGGCCGUUAGGCCGAA IGGCAUGA | 5195 |
| 2575 | CCUUCGGC U GCCUCCUG | 1419 | CAGGAGGC CUGAUGAGGCCGUUAGGCCGAA ICCGAAGG | 5196 |
| 2578 | UCGGCUGC C UCCUGGAC | 1420 | GUCCAGGA CUGAUGAGGCCGUUAGGCCGAA ICAGCCGA | 5197 |
| 2579 | CGGCUGCC U CCUGGACU | 1421 | AGUCCAGG CUGAUGAGGCCGUUAGGCCGAA IGCAGCCG | 5198 |
| 2581 | GCUGCCUC C UGGACUAU | 1422 | AUAGUCCA CUGAUGAGGCCGUUAGGCCGAA IAGGCAGC | 5199 |
| 2582 | CUGCCUCC U GGACUAUG | 1423 | CAUAGUCC CUGAUGAGGCCGUUAGGCCGAA IGAGGCAG | 5200 |
| 2587 | UCCUGGAC U AUGUCCGG | 1424 | CCGGACAU CUGAUGAGGCCGUUAGGCCGAA IUCCAGGA | 5201 |
| 2593 | ACUAUGUC C GGGAACAC | 1425 | GUGUUCCC CUGAUGAGGCCGUUAGGCCGAA IACAUAGU | 5202 |
| 2600 | CCGGGAAC A CAAAGACA | 1426 | UGUCUUUG CUGAUGAGGCCGUUAGGCCGAA IUUCCCGG | 5203 |
| 2602 | GGGAACAC A AAGACAAU | 1427 | AUUGUCUU CUGAUGAGGCCGUUAGGCCGAA IUGUUCCC | 5204 |
| 2608 | ACAAAGAC A AUAUUGGC | 1428 | GCCAAUAU CUGAUGAGGCCGUUAGGCCGAA IUCUUUGU | 5205 |
| 2617 | AUAUUGGC U CCCAGUAC | 1429 | GUACUGGG CUGAUGAGGCCGUUAGGCCGAA ICCAAUAU | 5206 |
| 2619 | AUUGGCUC C CAGUACCU | 1430 | AGGUACUG CUGAUGAGGCCGUUAGGCCGAA IAGCCAAU | 5207 |
| 2620 | UUGGCUCC C AGUACCUG | 1431 | CAGGUACU CUGAUGAGGCCGUUAGGCCGAA IGAGCCAA | 5208 |
| 2621 | UGGCUCCC A GUACCUGC | 1432 | GCAGGUAC CUGAUGAGGCCGUUAGGCCGAA IGGAGCCA | 5209 |
| 2626 | CCCAGUAC C UGCUCAAC | 1433 | GUUGAGCA CUGAUGAGGCCGUUAGGCCGAA IUACUGGG | 5210 |
| 2627 | CCAGUACC U GCUCAACU | 1434 | AGUUGAGC CUGAUGAGGCCGUUAGGCCGAA IGUACUGG | 5211 |
| 2630 | GUACCUGC U CAACUGGU | 1435 | ACCAGUUG CUGAUGAGGCCGUUAGGCCGAA ICAGGUAC | 5212 |
| 2632 | ACCUGCUC A ACUGGUGU | 1436 | ACACCAGU CUGAUGAGGCCGUUAGGCCGAA IAGCAGGU | 5213 |
| 2635 | UGCUCAAC U GGUGUGUG | 1437 | CACACACC CUGAUGAGGCCGUUAGGCCGAA IUUGAGCA | 5214 |
| 2645 | GUGUGUGC A GAUCGCAA | 1438 | UUGCGAUC CUGAUGAGGCCGUUAGGCCGAA ICACACAC | 5215 |
| 2652 | CAGAUCGC A AAGGGCAU | 1439 | AUGCCCUU CUGAUGAGGCCGUUAGGCCGAA ICGAUCUG | 5216 |
| 2659 | CAAAGGGC A UGAACUAC | 1440 | GUAGUUCA CUGAUGAGGCCGUUAGGCCGAA ICCCUUUG | 5217 |
| 2665 | GCAUGAAC U ACUUGGAG | 1441 | CUCCAAGU CUGAUGAGGCCGUUAGGCCGAA IUUCAUGC | 5218 |
| 2668 | UGAACUAC U UGGAGGAC | 1442 | GUCCUCCA CUGAUGAGGCCGUUAGGCCGAA IUAGUUCA | 5219 |
| 2677 | UGGAGGAC C GUCGCUUG | 1443 | CAAGCGAC CUGAUGAGGCCGUUAGGCCGAA IUCCUCCA | 5220 |
| 2683 | ACCGUCGC U UGGUGCAC | 1444 | GUGCACCA CUGAUGAGGCCGUUAGGCCGAA ICGACGGU | 5221 |
| 2690 | CUUGGUGC A CCGCGACC | 1445 | GGUCGCGG CUGAUGAGGCCGUUAGGCCGAA ICACCAAG | 5222 |
| 2692 | UGGUGCAC C GCGACCUG | 1446 | CAGGUCGC CUGAUGAGGCCGUUAGGCCGAA IUGCACCA | 5223 |
| 2698 | ACCGCGAC C UGGCAGCC | 1447 | GGCUGCCA CUGAUGAGGCCGUUAGGCCGAA IUCGCGGU | 5224 |
| 2699 | CCGCGACC U GGCAGCCA | 1448 | UGGCUGCC CUGAUGAGGCCGUUAGGCCGAA IGUCGCGG | 5225 |
| 2703 | GACCUGGC A GCCAGGAA | 1449 | UUCCUGGC CUGAUGAGGCCGUUAGGCCGAA ICCAGGUC | 5226 |
| 2706 | CUGGCAGC C AGGAACGU | 1450 | ACGUUCCU CUGAUGAGGCCGUUAGGCCGAA ICUGCCAG | 5227 |
| 2707 | UGGCAGCC A GGAACGUA | 1451 | UACGUUCC CUGAUGAGGCCGUUAGGCCGAA IGCUGCCA | 5228 |
| 2717 | GAACGUAC U GGUGAAAA | 1452 | UUUUCACC CUGAUGAGGCCGUUAGGCCGAA IUACGUUC | 5229 |
| 2727 | GUGAAAAC A CCGCAGCA | 1453 | UGCUGCGG CUGAUGAGGCCGUUAGGCCGAA IUUUUCAC | 5230 |
| 2729 | GAAAACAC C GCAGCAUG | 1454 | CAUGCUGC CUGAUGAGGCCGUUAGGCCGAA IUGUUUUC | 5231 |
| 2732 | AACACCGC A GCAUGUCA | 1455 | UGACAUGC CUGAUGAGGCCGUUAGGCCGAA ICGGUGUU | 5232 |
| 2735 | ACCGCAGC A UGUCAAGA | 1456 | UCUUGACA CUGAUGAGGCCGUUAGGCCGAA ICUGCGGU | 5233 |
| 2740 | AGCAUGUC A AGAUCACA | 1457 | UGUGAUCU CUGAUGAGGCCGUUAGGCCGAA IACAUGCU | 5234 |
| 2746 | UCAAGAUC A CAGAUUUU | 1458 | AAAAUCUG CUGAUGAGGCCGUUAGGCCGAA IAUCUUGA | 5235 |
| 2748 | AAGAUCAC A GAUUUUGG | 1459 | CCAAAAUC CUGAUGAGGCCGUUAGGCCGAA IUGAUCUU | 5236 |
| 2759 | UUUUGGGC U GGCCAAAC | 1460 | GUUUGGCC CUGAUGAGGCCGUUAGGCCGAA ICCCAAAA | 5237 |
| 2763 | GGGCUGGC C AAACUGCU | 1461 | AGCAGUUU CUGAUGAGGCCGUUAGGCCGAA ICCAGCCC | 5238 |
| 2764 | GGCUGGCC A AACUGCUG | 1462 | CAGCAGUU CUGAUGAGGCCGUUAGGCCGAA IGCCAGCC | 5239 |
| 2768 | GGCCAAAC U GCUGGGUG | 1463 | CACCCAGC CUGAUGAGGCCGUUAGGCCGAA IUUUGGCC | 5240 |
| 2771 | CAAACUGC U GGGUGCGG | 1464 | CCGCACCC CUGAUGAGGCCGUUAGGCCGAA ICAGUUUG | 5241 |
| 2794 | AAGAAUAC C AUGCAGAA | 1465 | UUCUGCAU CUGAUGAGGCCGUUAGGCCGAA IUAUUCUU | 5242 |
| 2795 | AGAAUACC A UGCAGAAG | 1466 | CUUCUGCA CUGAUGAGGCCGUUAGGCCGAA IGUAUUCU | 5243 |
| 2799 | UACCAUGC A GAAGGAGG | 1467 | CCUCCUUC CUGAUGAGGCCGUUAGGCCGAA ICAUGGUA | 5244 |
| 2809 | AAGGAGGC A AAGUGCCU | 1468 | AGGCACUU CUGAUGAGGCCGUUAGGCCGAA ICCUCCUU | 5245 |
| 2816 | CAAAGUGC C UAUCAAGU | 1469 | ACUUGAUA CUGAUGAGGCCGUUAGGCCGAA ICACUUUG | 5246 |
| 2817 | AAAGUGCC U AUCAAGUG | 1470 | CACUUGAU CUGAUGAGGCCGUUAGGCCGAA IGCACUUU | 5247 |
| 2821 | UGCCUAUC A AGUGGAUG | 1471 | CAUCCACU CUGAUGAGGCCGUUAGGCCGAA IAUAGGCA | 5248 |
| 2832 | UGGAUGGC A UUGGAAUC | 1472 | GAUUCCAA CUGAUGAGGCCGUUAGGCCGAA ICCAUCCA | 5249 |
| 2841 | UUGGAAUC A AUUUUACA | 1473 | UGUAAAAU CUGAUGAGGCCGUUAGGCCGAA IAUUCCAA | 5250 |
| 2849 | AAUUUUAC A CAGAAUCU | 1474 | AGAUUCUG CUGAUGAGGCCGUUAGGCCGAA IUAAAAUU | 5251 |
| 2851 | UUUUACAC A GAAUCUAU | 1475 | AUAGAUUC CUGAUGAGGCCGUUAGGCCGAA IUGUAAAA | 5252 |
| 2857 | ACAGAAUC U AUACCCAC | 1476 | GUGGGUAU CUGAUGAGGCCGUUAGGCCGAA IAUUCUGU | 5253 |
| 2862 | AUCUAUAC C CACCAGAG | 1477 | CUCUGGUG CUGAUGAGGCCGUUAGGCCGAA IUAUAGAU | 5254 |
| 2863 | UCUAUACC C ACCAGAGU | 1478 | ACUCUGGU CUGAUGAGGCCGUUAGGCCGAA IGUAUAGA | 5255 |
| 2864 | CUAUACCC A CCAGAGUG | 1479 | CACUCUGG CUGAUGAGGCCGUUAGGCCGAA IGGUAUAG | 5256 |
| 2866 | AUACCCAC C AGAGUGAU | 1480 | AUCACUCU CUGAUGAGGCCGUUAGGCCGAA IUGGGUAU | 5257 |
| 2867 | UACCCACC A GAGUGAUG | 1481 | CAUCACUC CUGAUGAGGCCGUUAGGCCGAA IGUGGGUA | 5258 |
| 2878 | GUGAUGUC U GGAGCUAC | 1482 | GUAGCUCC CUGAUGAGGCCGUUAGGCCGAA IACAUCAC | 5259 |
| 2884 | UCUGGAGC U ACGGGGUG | 1483 | CACCCCGU CUGAUGAGGCCGUUAGGCCGAA ICUCCAGA | 5260 |
| 2895 | GGGGUGAC C GUUUGGGA | 1484 | UCCCAAAC CUGAUGAGGCCGUUAGGCCGAA IUCACCCC | 5261 |
| 2913 | UUGAUGAC C UUUGGAUC | 1485 | GAUCCAAA CUGAUGAGGCCGUUAGGCCGAA IUCAUCAA | 5262 |
| 2914 | UGAUGACC U UUGGAUCC | 1486 | GGAUCCAA CUGAUGAGGCCGUUAGGCCGAA IGUCAUCA | 5263 |
| 2922 | UUUGGAUC C AAGCCAUA | 1487 | UAUGGCUU CUGAUGAGGCCGUUAGGCCGAA IAUCCAAA | 5264 |
| 2923 | UUGGAUCC A AGCCAUAU | 1488 | AUAUGGCU CUGAUGAGGCCGUUAGGCCGAA IGAUCCAA | 5265 |
| 2927 | AUCCAAGC C AUAUGACG | 1489 | CGUCAUAU CUGAUGAGGCCGUUAGGCCGAA ICUUGGAU | 5266 |
| 2928 | UCCAAGCC A UAUGACGG | 1490 | CCGUCAUA CUGAUGAGGCCGUUAGGCCGAA IGCUUGGA | 5267 |
| 2941 | ACGGAAUC C CUGCCAGC | 1491 | GCUGGCAG CUGAUGAGGCCGUUAGGCCGAA IAUUCCGU | 5268 |
| 2942 | CGGAAUCC C UGCCAGCG | 1492 | CGCUGGCA CUGAUGAGGCCGUUAGGCCGAA IGAUUCCG | 5269 |
| 2943 | GGAAUCCC U GCCAGCGA | 1493 | UCGCUGGC CUGAUGAGGCCGUUAGGCCGAA IGGAUUCC | 5270 |
| 2946 | AUCCCUGC C AGCGAGAU | 1494 | AUCUCGCU CUGAUGAGGCCGUUAGGCCGAA ICAGGGAU | 5271 |
| 2947 | UCCCUGCC A GCGAGAUC | 1495 | GAUCUCGC CUGAUGAGGCCGUUAGGCCGAA IGCAGGGA | 5272 |
| 2956 | GCGAGAUC U CCUCCAUC | 1496 | GAUGGAGG CUGAUGAGGCCGUUAGGCCGAA IAUCUCGC | 5273 |
| 2958 | GAGAUCUC C UCCAUCCU | 1497 | AGGAUGGA CUGAUGAGGCCGUUAGGCCGAA IAGAUCUC | 5274 |
| 2959 | AGAUCUCC U CCAUCCUG | 1498 | CAGGAUGG CUGAUGAGGCCGUUAGGCCGAA IGAGAUCU | 5275 |
| 2961 | AUCUCCUC C AUCCUGGA | 1499 | UCCAGGAU CUGAUGAGGCCGUUAGGCCGAA IAGGAGAU | 5276 |
| 2962 | UCUCCUCC A UCCUGGAG | 1500 | CUCCAGGA CUGAUGAGGCCGUUAGGCCGAA IGAGGAGA | 5277 |
| 2965 | CCUCCAUC C UGGAGAAA | 1501 | UUUCUCCA CUGAUGAGGCCGUUAGGCCGAA IAUGGAGG | 5278 |
| 2966 | CUCCAUCC U GGAGAAAG | 1502 | CUUUCUCC CUGAUGAGGCCGUUAGGCCGAA IGAUGGAG | 5279 |
| 2983 | GAGAACGC C UCCCUCAG | 1503 | CUGAGGGA CUGAUGAGGCCGUUAGGCCGAA ICGUUCUC | 5280 |
| 2984 | AGAACGCC U CCCUCAGC | 1504 | GCUGAGGG CUGAUGAGGCCGUUAGGCCGAA IGCGUUCU | 5281 |
| 2986 | AACGCCUC C CUCAGCCA | 1505 | UGGCUGAG CUGAUGAGGCCGUUAGGCCGAA IAGGCGUU | 5282 |
| 2987 | ACGCCUCC C UCAGCCAC | 1506 | GUGGCUGA CUGAUGAGGCCGUUAGGCCGAA IGAGGCGU | 5283 |
| 2988 | CGCCUCCC U CAGCCACC | 1507 | GGUGGCUG CUGAUGAGGCCGUUAGGCCGAA IGGAGGCG | 5284 |
| 2990 | CCUCCCUC A GCCACCCA | 1508 | UGGGUGGC CUGAUGAGGCCGUUAGGCCGAA IAGGGAGG | 5285 |
| 2993 | CCCUCAGC C ACCCAUAU | 1509 | AUAUGGGU CUGAUGAGGCCGUUAGGCCGAA ICUGAGGG | 5286 |
| 2994 | CCUCAGCC A CCCAUAUG | 1510 | CAUAUGGG CUGAUGAGGCCGUUAGGCCGAA IGCUGAGG | 5287 |
| 2996 | UCAGCCAC C CAUAUGUA | 1511 | UACAUAUG CUGAUGAGGCCGUUAGGCCGAA IUGGCUGA | 5288 |
| 2997 | CAGCCACC C AUAUGUAC | 1512 | GUACAUAU CUGAUGAGGCCGUUAGGCCGAA IGUGGCUG | 5289 |
| 2998 | AGCCACCC A UAUGUACC | 1513 | GGUACAUA CUGAUGAGGCCGUUAGGCCGAA IGGUGGCU | 5290 |
| 3006 | AUAUGUAC C AUCGAUGU | 1514 | ACAUCGAU CUGAUGAGGCCGUUAGGCCGAA IUACAUAU | 5291 |
| 3007 | UAUGUACC A UCGAUGUC | 1515 | GACAUCGA CUGAUGAGGCCGUUAGGCCGAA IGUACAUA | 5292 |
| 3016 | UCGAUGUC U ACAUGAUC | 1516 | GAUCAUGU CUGAUGAGGCCGUUAGGCCGAA IACAUCGA | 5293 |
| 3019 | AUGUCUAC A UGAUCAUG | 1517 | CAUGAUCA CUGAUGAGGCCGUUAGGCCGAA IUAGACAU | 5294 |
| 3025 | ACAUGAUC A UGGUCAAG | 1518 | CUUGACCA CUGAUGAGGCCGUUAGGCCGAA IAUCAUGU | 5295 |
| 3031 | UCAUGGUC A AGUGCUGG | 1519 | CCAGCACU CUGAUGAGGCCGUUAGGCCGAA IACCAUGA | 5296 |
| 3037 | UCAAGUGC U GGAUGAUA | 1520 | UAUCAUCC CUGAUGAGGCCGUUAGGCCGAA ICACUUGA | 5297 |
| 3051 | AUAGACGC A GAUAGUCG | 1521 | CGACUAUC CUGAUGAGGCCGUUAGGCCGAA ICGUCUAU | 5298 |
| 3061 | AUAGUCGC C CAAAGUUC | 1522 | GAACUUUG CUGAUGAGGCCGUUAGGCCGAA ICGACUAU | 5299 |
| 3062 | UAGUCGCC C AAAGUUCC | 1523 | GGAACUUU CUGAUGAGGCCGUUAGGCCGAA IGCGACUA | 5300 |
| 3063 | AGUCGCCC A AAGUUCCG | 1524 | CGGAACUU CUGAUGAGGCCGUUAGGCCGAA IGGCGACU | 5301 |
| 3070 | CAAAGUUC C GUGAGUUG | 1525 | CAACUCAC CUGAUGAGGCCGUUAGGCCGAA IAACUUUG | 5302 |
| 3082 | AGUUGAUC A UCGAAUUC | 1526 | GAAUUCGA CUGAUGAGGCCGUUAGGCCGAA IAUCAACU | 5303 |
| 3091 | UCGAAUUC U CCAAAAUG | 1527 | CAUUUUGG CUGAUGAGGCCGUUAGGCCGAA IAAUUCGA | 5304 |
| 3093 | GAAUUCUC C AAAAUGGC | 1528 | GCCAUUUU CUGAUGAGGCCGUUAGGCCGAA IAGAAUUC | 5305 |
| 3094 | AAUUCUCC A AAAUGGCC | 1529 | GGCCAUUU CUGAUGAGGCCGUUAGGCCGAA IGAGAAUU | 5306 |
| 3102 | AAAAUGGC C CGAGACCC | 1530 | GGGUCUCG CUGAUGAGGCCGUUAGGCCGAA ICCAUUUU | 5307 |
| 3103 | AAAUGGCC C GAGACCCC | 1531 | GGGGUCUC CUGAUGAGGCCGUUAGGCCGAA IGCCAUUU | 5308 |
| 3109 | CCCGAGAC C CCCAGCGC | 1532 | GCGCUGGG CUGAUGAGGCCGUUAGGCCGAA IUCUCGGG | 5309 |
| 3110 | CCGAGACC C CCAGCGCU | 1533 | AGCGCUGG CUGAUGAGGCCGUUAGGCCGAA IGUCUCGG | 5310 |
| 3111 | CGAGACCC C CAGCGCUA | 1534 | UAGCGCUG CUGAUGAGGCCGUUAGGCCGAA IGGUCUCG | 5311 |
| 3112 | GAGACCCC C AGCGCUAC | 1535 | GUAGCGCU CUGAUGAGGCCGUUAGGCCGAA IGGGUCUC | 5312 |
| 3113 | AGACCCCC A GCGCUACC | 1536 | GGUAGCGC CUGAUGAGGCCGUUAGGCCGAA IGGGGUCU | 5313 |
| 3118 | CCCAGCGC U ACCUUGUC | 1537 | GACAAGGU CUGAUGAGGCCGUUAGGCCGAA ICGCUGGG | 5314 |
| 3121 | AGCGCUAC C UUGUCAUU | 1538 | AAUGACAA CUGAUGAGGCCGUUAGGCCGAA IUAGCGCU | 5315 |
| 3122 | GCGCUACC U UGUCAUUC | 1539 | GAAUGACA CUGAUGAGGCCGUUAGGCCGAA IGUAGCGC | 5316 |
| 3127 | ACCUUGUC A UUCAGGGG | 1540 | CCCCUGAA CUGAUGAGGCCGUUAGGCCGAA IACAAGGU | 5317 |
| 3131 | UGUCAUUC A GGGGGAUG | 1541 | CAUCCCCC CUGAUGAGGCCGUUAGGCCGAA IAAUGACA | 5318 |
| 3149 | AAGAAUGC A UUUGCCAA | 1542 | UUGGCAAA CUGAUGAGGCCGUUAGGCCGAA ICAUUCUU | 5319 |
| 3155 | GCAUUUGC C AAGUCCUA | 1543 | UAGGACUU CUGAUGAGGCCGUUAGGCCGAA ICAAAUGC | 5320 |
| 3156 | CAUUUGCC A AGUCCUAC | 1544 | GUAGGACU CUGAUGAGGCCGUUAGGCCGAA IGCAAAUG | 5321 |
| 3161 | GCCAAGUC C UACAGACU | 1545 | AGUCUGUA CUGAUGAGGCCGUUAGGCCGAA IACUUGGC | 5322 |
| 3162 | CCAAGUCC U ACAGACUC | 1546 | GAGUCUGU CUGAUGAGGCCGUUAGGCCGAA IGACUUGG | 5323 |
| 3165 | AGUCCUAC A GACUCCAA | 1547 | UUGGAGUC CUGAUGAGGCCGUUAGGCCGAA IUAGGACU | 5324 |
| 3169 | CUACAGAC U CCAACUUC | 1548 | GAAGUUGG CUGAUGAGGCCGUUAGGCCGAA IUCUGUAG | 5325 |
| 3171 | ACAGACUC C AACUUCUA | 1549 | UAGAAGUU CUGAUGAGGCCGUUAGGCCGAA IAGUCUGU | 5326 |
| 3172 | CAGACUCC A ACUUCUAC | 1550 | GUAGAAGU CUGAUGAGGCCGUUAGGCCGAA IGAGUCUG | 5327 |
| 3175 | ACUCCAAC U UCUACCGU | 1551 | ACGGUAGA CUGAUGAGGCCGUUAGGCCGAA IUUGGAGU | 5328 |
| 3178 | CCAACUUC U ACCGUGCC | 1552 | GGCACGGU CUGAUGAGGCCGUUAGGCCGAA IAAGUUGG | 5329 |
| 3181 | ACUUCUAC C GUGCCCUG | 1553 | CAGGGCAC CUGAUGAGGCCGUUAGGCCGAA IUAGAAGU | 5330 |
| 3186 | UACCGUGC C CUGAUGGA | 1554 | UCCAUCAG CUGAUGAGGCCGUUAGGCCGAA ICACGGUA | 5331 |
| 3187 | ACCGUGCC C UGAUGGAU | 1555 | AUCCAUCA CUGAUGAGGCCGUUAGGCCGAA IGCACGGU | 5332 |
| 3188 | CCGUGCCC U GAUGGAUG | 1556 | CAUCCAUC CUGAUGAGGCCGUUAGGCCGAA IGGCACGG | 5333 |
| 3205 | AAGAAGAC A UGGACGAC | 1557 | GUCGUCCA CUGAUGAGGCCGUUAGGCCGAA IUCUUCUU | 5334 |
| 3225 | GUGGAUGC C GACGAGUA | 1558 | UACUCGUC CUGAUGAGGCCGUUAGGCCGAA ICAUCCAC | 5335 |
| 3235 | ACGAGUAC C UCAUCCCA | 1559 | UGGGAUGA CUGAUGAGGCCGUUAGGCCGAA IUACUCGU | 5336 |
| 3236 | CGAGUACC U CAUCCCAC | 1560 | GUGGGAUG CUGAUGAGGCCGUUAGGCCGAA IGUACUCG | 5337 |
| 3238 | AGUACCUC A UCCCACAG | 1561 | CUGUGGGA CUGAUGAGGCCGUUAGGCCGAA IAGGUACU | 5338 |
| 3241 | ACCUCAUC C CACAGCAG | 1562 | CUGCUGUG CUGAUGAGGCCGUUAGGCCGAA IAUGAGGU | 5339 |
| 3242 | CCUCAUCC C ACAGCAGG | 1563 | CCUGCUGU CUGAUGAGGCCGUUAGGCCGAA IGAUGAGG | 5340 |
| 3243 | CUCAUCCC A CAGCAGGG | 1564 | CCCUGCUG CUGAUGAGGCCGUUAGGCCGAA IGGAUGAG | 5341 |
| 3245 | CAUCCCAC A GCAGGGCU | 1565 | AGCCCUGC CUGAUGAGGCCGUUAGGCCGAA IUGGGAUG | 5342 |
| 3248 | CCCACAGC A GGGCUUCU | 1566 | AGAAGCCC CUGAUGAGGCCGUUAGGCCGAA ICUGUGGG | 5343 |
| 3253 | AGCAGGGC U UCUUCAGC | 1567 | GCUGAAGA CUGAUGAGGCCGUUAGGCCGAA ICCCUGCU | 5344 |
| 3256 | AGGGCUUC U UCAGCAGC | 1568 | GCUGCUGA CUGAUGAGGCCGUUAGGCCGAA IAAGCCCU | 5345 |
| 3259 | GCUUCUUC A GCAGCCCC | 1569 | GGGGCUGC CUGAUGAGGCCGUUAGGCCGAA IAAGAAGC | 5346 |
| 3262 | UCUUCAGC A GCCCCUCC | 1570 | GGAGGGGC CUGAUGAGGCCGUUAGGCCGAA ICUGAAGA | 5347 |
| 3265 | UCAGCAGC C CCUCCACG | 1571 | CGUGGAGG CUGAUGAGGCCGUUAGGCCGAA ICUGCUGA | 5348 |
| 3266 | CAGCAGCC C CUCCACGU | 1572 | ACGUGGAG CUGAUGAGGCCGUUAGGCCGAA IGCUGCUG | 5349 |
| 3267 | AGCAGCCC C UCCACGUC | 1573 | GACGUGGA CUGAUGAGGCCGUUAGGCCGAA IGGCUGCU | 5350 |
| 3268 | GCAGCCCC U CCACGUCA | 1574 | UGACGUGG CUGAUGAGGCCGUUAGGCCGAA IGGGCUGC | 5351 |
| 3270 | AGCCCCUC C ACGUCACG | 1575 | CGUGACGU CUGAUGAGGCCGUUAGGCCGAA IAGGGGCU | 5352 |
| 3271 | GCCCCUCC A CGUCACGG | 1576 | CCGUGACG CUGAUGAGGCCGUUAGGCCGAA IGAGGGGC | 5353 |
| 3276 | UCCACGUC A CGGACUCC | 1577 | GGAGUCCG CUGAUGAGGCCGUUAGGCCGAA IACGUGGA | 5354 |
| 3282 | UCACGGAC U CCCCUCCU | 1578 | AGGAGGGG CUGAUGAGGCCGUUAGGCCGAA IUCCGUGA | 5355 |
| 3284 | ACGGACUC C CCUCCUGA | 1579 | UCAGGAGG CUGAUGAGGCCGUUAGGCCGAA IAGUCCGU | 5356 |
| 3285 | CGGACUCC C CUCCUGAG | 1580 | CUCAGGAG CUGAUGAGGCCGUUAGGCCGAA IGAGUCCG | 5357 |
| 3286 | GGACUCCC C UCCUGAGC | 1581 | GCUCAGGA CUGAUGAGGCCGUUAGGCCGAA IGGAGUCC | 5358 |
| 3287 | GACUCCCC U CCUGAGCU | 1582 | AGCUCAGG CUGAUGAGGCCGUUAGGCCGAA IGGGAGUC | 5359 |
| 3289 | CUCCCCUC C UGAGCUCU | 1583 | AGAGCUCA CUGAUGAGGCCGUUAGGCCGAA IAGGGGAG | 5360 |
| 3290 | UCCCCUCC U GAGCUCUC | 1584 | GAGAGCUC CUGAUGAGGCCGUUAGGCCGAA IGAGGGGA | 5361 |
| 3295 | UCCUGAGC U CUCUGAGU | 1585 | ACUCAGAG CUGAUGAGGCCGUUAGGCCGAA ICUCAGGA | 5362 |
| 3297 | CUGAGCUC U CUGAGUGC | 1586 | GCACUCAG CUGAUGAGGCCGUUAGGCCGAA IAGCUCAG | 5363 |
| 3299 | GAGCUCUC U GAGUGCAA | 1587 | UUGCACUC CUGAUGAGGCCGUUAGGCCGAA IAGAGCUC | 5364 |
| 3306 | CUGAGUGC A ACCAGCAA | 1588 | UUGCUGGU CUGAUGAGGCCGUUAGGCCGAA ICACUCAG | 5365 |
| 3309 | AGUGCAAC C AGCAACAA | 1589 | UUGUUGCU CUGAUGAGGCCGUUAGGCCGAA IUUGCACU | 5366 |
| 3310 | GUGCAACC A GCAACAAU | 1590 | AUUGUUGC CUGAUGAGGCCGUUAGGCCGAA IGUUGCAC | 5367 |
| 3313 | CAACCAGC A ACAAUUCC | 1591 | GGAAUUGU CUGAUGAGGCCGUUAGGCCGAA ICUGGUUG | 5368 |
| 3316 | CCAGCAAC A AUUCCACC | 1592 | GGUGGAAU CUGAUGAGGCCGUUAGGCCGAA IUUGCUGG | 5369 |
| 3321 | AACAAUUC C ACCGUGGC | 1593 | GCCACGGU CUGAUGAGGCCGUUAGGCCGAA IAAUUGUU | 5370 |
| 3322 | ACAAUUCC A CCGUGGCU | 1594 | AGCCACGG CUGAUGAGGCCGUUAGGCCGAA IGAAUUGU | 5371 |
| 3324 | AAUUCCAC C GUGGCUUG | 1595 | CAAGCCAC CUGAUGAGGCCGUUAGGCCGAA IUGGAAUU | 5372 |
| 3330 | ACCGUGGC U UGCAUUGA | 1596 | UCAAUGCA CUGAUGAGGCCGUUAGGCCGAA ICCACGGU | 5373 |
| 3334 | UGGCUUGC A UUGAUAGA | 1597 | UCUAUCAA CUGAUGAGGCCGUUAGGCCGAA ICAAGCCA | 5374 |
| 3350 | AAAUGGGC U GCAAAGCU | 1598 | AGCUUUGC CUGAUGAGGCCGUUAGGCCGAA ICCCAUUU | 5375 |
| 3353 | UGGGCUGC A AAGCUGUC | 1599 | GACAGCUU CUGAUGAGGCCGUUAGGCCGAA ICAGCCCA | 5376 |
| 3358 | UGCAAAGC U GUCCCAUC | 1600 | GAUGGGAC CUGAUGAGGCCGUUAGGCCGAA ICUUUGCA | 5377 |
| 3362 | AAGCUGUC C CAUCAAGG | 1601 | CCUUGAUG CUGAUGAGGCCGUUAGGCCGAA IACAGCUU | 5378 |
| 3363 | AGCUGUCC C AUCAAGGA | 1602 | UCCUUGAU CUGAUGAGGCCGUUAGGCCGAA IGACAGCU | 5379 |
| 3364 | GCUGUCCC A UCAAGGAA | 1603 | UUCCUUGA CUGAUGAGGCCGUUAGGCCGAA IGGACAGC | 5380 |
| 3367 | GUCCCAUC A AGGAAGAC | 1604 | GUCUUCCU CUGAUGAGGCCGUUAGGCCGAA IAUGGGAC | 5381 |
| 3376 | AGGAAGAC A GCUUCUUG | 1605 | CAAGAAGC CUGAUGAGGCCGUUAGGCCGAA IUCUUCCU | 5382 |
| 3379 | AAGACAGC U UCUUGCAG | 1606 | CUGCAAGA CUGAUGAGGCCGUUAGGCCGAA ICUGUCUU | 5383 |
| 3382 | ACAGCUUC U UGCAGCGA | 1607 | UCGCUGCA CUGAUGAGGCCGUUAGGCCGAA IAAGCUGU | 5384 |
| 3386 | CUUCUUGC A GCGAUACA | 1608 | UGUAUCGC CUGAUGAGGCCGUUAGGCCGAA ICAAGAAG | 5385 |
| 3394 | AGCGAUAC A GCUCAGAC | 1609 | GUCUGAGC CUGAUGAGGCCGUUAGGCCGAA IUAUCGCU | 5386 |
| 3397 | GAUACAGC U CAGACCCC | 1610 | GGGGUCUG CUGAUGAGGCCGUUAGGCCGAA ICUGUAUC | 5387 |
| 3399 | UACAGCUC A GACCCCAC | 1611 | GUGGGGUC CUGAUGAGGCCGUUAGGCCGAA IAGCUGUA | 5388 |
| 3403 | GCUCAGAC C CCACAGGC | 1612 | GCCUGUGG CUGAUGAGGCCGUUAGGCCGAA IUCUGAGC | 5389 |
| 3404 | CUCAGACC C CACAGGCG | 1613 | CGCCUGUG CUGAUGAGGCCGUUAGGCCGAA IGUCUGAG | 5390 |
| 3405 | UCAGACCC C ACAGGCGC | 1614 | GCGCCUGU CUGAUGAGGCCGUUAGGCCGAA IGGUCUGA | 5391 |
| 3406 | CAGACCCC A CAGGCGCC | 1615 | GGCGCCUG CUGAUGAGGCCGUUAGGCCGAA IGGGUCUG | 5392 |
| 3408 | GACCCCAC A GGCGCCUU | 1616 | AAGGCGCC CUGAUGAGGCCGUUAGGCCGAA IUGGGGUC | 5393 |
| 3414 | ACAGGCGC C UUGACUGA | 1617 | UCAGUCAA CUGAUGAGGCCGUUAGGCCGAA ICGCCUGU | 5394 |
| 3415 | CAGGCGCC U UGACUGAG | 1618 | CUCAGUCA CUGAUGAGGCCGUUAGGCCGAA IGCGCCUG | 5395 |
| 3420 | GCCUUGAC U GAGGACAG | 1619 | CUGUCCUC CUGAUGAGGCCGUUAGGCCGAA IUCAAGGC | 5396 |
| 3427 | CUGAGGAC A GCAUAGAC | 1620 | GUCUAUGC CUGAUGAGGCCGUUAGGCCGAA IUCCUCAG | 5397 |
| 3430 | AGGACAGC A UAGACGAC | 1621 | GUCGUCUA CUGAUGAGGCCGUUAGGCCGAA ICUGUCCU | 5398 |
| 3439 | UAGACGAC A CCUUCCUC | 1622 | GAGGAAGG CUGAUGAGGCCGUUAGGCCGAA IUCGUCUA | 5399 |
| 3441 | GACGACAC C UUCCUCCC | 1623 | GGGAGGAA CUGAUGAGGCCGUUAGGCCGAA IUGUCGUC | 5400 |
| 3442 | ACGACACC U UCCUCCCA | 1624 | UGGGAGGA CUGAUGAGGCCGUUAGGCCGAA IGUGUCGU | 5401 |
| 3445 | ACACCUUC C UCCCAGUG | 1625 | CACUGGGA CUGAUGAGGCCGUUAGGCCGAA IAAGGUGU | 5402 |
| 3446 | CACCUUCC U CCCAGUGC | 1626 | GCACUGGG CUGAUGAGGCCGUUAGGCCGAA IGAAGGUG | 5403 |
| 3448 | CCUUCCUC C CAGUGCCU | 1627 | AGGCACUG CUGAUGAGGCCGUUAGGCCGAA IAGGAAGG | 5404 |
| 3449 | CUUCCUCC C AGUGCCUG | 1628 | CAGGCACU CUGAUGAGGCCGUUAGGCCGAA IGAGGAAG | 5405 |
| 3450 | UUCCUCCC A GUGCCUGA | 1629 | UCAGGCAC CUGAUGAGGCCGUUAGGCCGAA IGGAGGAA | 5406 |
| 3455 | CCCAGUGC C UGAAUACA | 1630 | UGUAUUCA CUGAUGAGGCCGUUAGGCCGAA ICACUGGG | 5407 |
| 3456 | CCAGUGCC U GAAUACAU | 1631 | AUGUAUUC CUGAUGAGGCCGUUAGGCCGAA IGCACUGG | 5408 |
| 3463 | CUGAAUAC A UAAACCAG | 1632 | CUGGUUUA CUGAUGAGGCCGUUAGGCCGAA IUAUUCAG | 5409 |
| 3469 | ACAUAAAC C AGUCCGUU | 1633 | AACGGACU CUGAUGAGGCCGUUAGGCCGAA IUUUAUGU | 5410 |
| 3470 | CAUAAACC A GUCCGUUC | 1634 | GAACGGAC CUGAUGAGGCCGUUAGGCCGAA IGUUUAUG | 5411 |
| 3474 | AACCAGUC C GUUCCCAA | 1635 | UUGGGAAC CUGAUGAGGCCGUUAGGCCGAA IACUGGUU | 5412 |
| 3479 | GUCCGUUC C CAAAAGGC | 1636 | GCCUUUUG CUGAUGAGGCCGUUAGGCCGAA IAACGGAC | 5413 |
| 3480 | UCCGUUCC C AAAAGGCC | 1637 | GGCCUUUU CUGAUGAGGCCGUUAGGCCGAA IGAACGGA | 5414 |
| 3481 | CCGUUCCC A AAAGGCCC | 1638 | GGGCCUUU CUGAUGAGGCCGUUAGGCCGAA IGGAACGG | 5415 |
| 3488 | CAAAAGGC C CGCUGGCU | 1639 | AGCCAGCG CUGAUGAGGCCGUUAGGCCGAA ICCUUUUG | 5416 |
| 3489 | AAAAGGCC C GCUGGCUC | 1640 | GAGCCAGC CUGAUGAGGCCGUUAGGCCGAA IGCCUUUU | 5417 |
| 3492 | AGGCCCGC U GGCUCUGU | 1641 | ACAGAGCC CUGAUGAGGCCGUUAGGCCGAA ICGGGCCU | 5418 |
| 3496 | CCGCUGGC U CUGUGCAG | 1642 | CUGCACAG CUGAUGAGGCCGUUAGGCCGAA ICCAGCGG | 5419 |
| 3498 | GCUGGCUC U GUGCAGAA | 1643 | UUCUGCAC CUGAUGAGGCCGUUAGGCCGAA IAGCCAGC | 5420 |
| 3503 | CUCUGUGC A GAAUCCUG | 1644 | CAGGAUUC CUGAUGAGGCCGUUAGGCCGAA ICACAGAG | 5421 |
| 3509 | GCAGAAUC C UGUCUAUC | 1645 | GAUAGACA CUGAUGAGGCCGUUAGGCCGAA IAUUCUGC | 5422 |
| 3510 | CAGAAUCC U GUCUAUCA | 1646 | UGAUAGAC CUGAUGAGGCCGUUAGGCCGAA IGAUUCUG | 5423 |
| 3514 | AUCCUGUC U AUCACAAU | 1647 | AUUGUGAU CUGAUGAGGCCGUUAGGCCGAA IACAGGAU | 5424 |
| 3518 | UGUCUAUC A CAAUCAGC | 1648 | GCUGAUUG CUGAUGAGGCCGUUAGGCCGAA IAUAGACA | 5425 |
| 3520 | UCUAUCAC A AUCAGCCU | 1649 | AGGCUGAU CUGAUGAGGCCGUUAGGCCGAA IUGAUAGA | 5426 |
| 3524 | UCACAAUC A GCCUCUGA | 1650 | UCAGAGGC CUGAUGAGGCCGUUAGGCCGAA IAUUGUGA | 5427 |
| 3527 | CAAUCAGC C UCUGAACC | 1651 | GGUUCAGA CUGAUGAGGCCGUUAGGCCGAA ICUGAUUG | 5428 |
| 3528 | AAUCAGCC U CUGAACCC | 1652 | GGGUUCAG CUGAUGAGGCCGUUAGGCCGAA IGCUGAUU | 5429 |
| 3530 | UCAGCCUC U GAACCCCG | 1653 | CGGGGUUC CUGAUGAGGCCGUUAGGCCGAA IAGGCUGA | 5430 |
| 3535 | CUCUGAAC C CCGCGCCC | 1654 | GGGCGCGG CUGAUGAGGCCGUUAGGCCGAA IUUCAGAG | 5431 |
| 3536 | UCUGAACC C CGCGCCCA | 1655 | UGGGCGCG CUGAUGAGGCCGUUAGGCCGAA IGUUCAGA | 5432 |
| 3537 | CUGAACCC C GCGCCCAG | 1656 | CUGGGCGC CUGAUGAGGCCGUUAGGCCGAA IGGUUCAG | 5433 |
| 3542 | CCCCGCGC C CAGCAGAG | 1657 | CUCUGCUG CUGAUGAGGCCGUUAGGCCGAA ICGCGGGG | 5434 |
| 3543 | CCCGCGCC C AGCAGAGA | 1658 | UCUCUGCU CUGAUGAGGCCGUUAGGCCGAA IGCGCGGG | 5435 |
| 3544 | CCGCGCCC A GCAGAGAC | 1659 | GUCUCUGC CUGAUGAGGCCGUUAGGCCGAA IGGCGCGG | 5436 |
| 3547 | CGCCCAGC A GAGACCCA | 1660 | UGGGUCUC CUGAUGAGGCCGUUAGGCCGAA ICUGGGCG | 5437 |
| 3553 | GCAGAGAC C CACACUAC | 1661 | GUAGUGUG CUGAUGAGGCCGUUAGGCCGAA IUCUCUGC | 5438 |
| 3554 | CAGAGACC C ACACUACC | 1662 | GGUAGUGU CUGAUGAGGCCGUUAGGCCGAA IGUCUCUG | 5439 |
| 3555 | AGAGACCC A CACUACCA | 1663 | UGGUAGUG CUGAUGAGGCCGUUAGGCCGAA IGGUCUCU | 5440 |
| 3557 | AGACCCAC A CUACCAGG | 1664 | CCUGGUAG CUGAUGAGGCCGUUAGGCCGAA IUGGGUCU | 5441 |
| 3559 | ACCCACAC U ACCAGGAC | 1665 | GUCCUGGU CUGAUGAGGCCGUUAGGCCGAA IUGUGGGU | 5442 |
| 3562 | CACACUAC C AGGACCCC | 1666 | GGGGUCCU CUGAUGAGGCCGUUAGGCCGAA IUAGUGUG | 5443 |
| 3563 | ACACUACC A GGACCCCC | 1667 | GGGGGUCC CUGAUGAGGCCGUUAGGCCGAA IGUAGUGU | 5444 |
| 3568 | ACCAGGAC C CCCACAGC | 1668 | GCUGUGGG CUGAUGAGGCCGUUAGGCCGAA IUCCUGGU | 5445 |
| 3569 | CCAGGACC C CCACAGCA | 1669 | UGCUGUGG CUGAUGAGGCCGUUAGGCCGAA IGUCCUGG | 5446 |
| 3570 | CAGGACCC C CACAGCAC | 1670 | GUGCUGUG CUGAUGAGGCCGUUAGGCCGAA IGGUCCUG | 5447 |
| 3571 | AGGACCCC C ACAGCACU | 1671 | AGUGCUGU CUGAUGAGGCCGUUAGGCCGAA IGGGUCCU | 5448 |
| 3572 | GGACCCCC A CAGCACUG | 1672 | CAGUGCUG CUGAUGAGGCCGUUAGGCCGAA IGGGGUCC | 5449 |
| 3574 | ACCCCCAC A GCACUGCA | 1673 | UGCAGUGC CUGAUGAGGCCGUUAGGCCGAA IUGGGGGU | 5450 |
| 3577 | CCCACAGC A CUGCAGUG | 1674 | CACUGCAG CUGAUGAGGCCGUUAGGCCGAA ICUGUGGG | 5451 |
| 3579 | CACAGCAC U GCAGUGGG | 1675 | CCCACUGC CUGAUGAGGCCGUUAGGCCGAA IUGCUGUG | 5452 |
| 3582 | AGCACUGC A GUGGGCAA | 1676 | UUGCCCAC CUGAUGAGGCCGUUAGGCCGAA ICAGUGCU | 5453 |
| 3589 | CAGUGGGC A ACCCCGAG | 1677 | CUCGGGGU CUGAUGAGGCCGUUAGGCCGAA ICCCACUG | 5454 |
| 3592 | UGGGCAAC C CCGAGUAU | 1678 | AUACUCGG CUGAUGAGGCCGUUAGGCCGAA IUUGCCCA | 5455 |
| 3593 | GGGCAACC C CGAGUAUC | 1679 | GAUACUCG CUGAUGAGGCCGUUAGGCCGAA IGUUGCCC | 5456 |
| 3594 | GGCAACCC C GAGUAUCU | 1680 | AGAUACUC CUGAUGAGGCCGUUAGGCCGAA IGGUUGCC | 5457 |
| 3602 | CGAGUAUC U CAACACUG | 1681 | CAGUGUUG CUGAUGAGGCCGUUAGGCCGAA IAUACUCG | 5458 |
| 3604 | AGUAUCUC A ACACUGUC | 1682 | GACAGUGU CUGAUGAGGCCGUUAGGCCGAA IAGAUACU | 5459 |
| 3607 | AUCUCAAC A CUGUCCAG | 1683 | CUGGACAG CUGAUGAGGCCGUUAGGCCGAA IUUGAGAU | 5460 |
| 3609 | CUCAACAC U GUCCAGCC | 1684 | GGCUGGAC CUGAUGAGGCCGUUAGGCCGAA IUGUUGAG | 5461 |
| 3613 | ACACUGUC C AGCCCACC | 1685 | GGUGGGCU CUGAUGAGGCCGUUAGGCCGAA IACAGUGU | 5462 |
| 3614 | CACUGUCC A GCCCACCU | 1686 | AGGUGGGC CUGAUGAGGCCGUUAGGCCGAA IGACAGUG | 5463 |
| 3617 | UGUCCAGC C CACCUGUG | 1687 | CACAGGUG CUGAUGAGGCCGUUAGGCCGAA ICUGGACA | 5464 |
| 3618 | GUCCAGCC C ACCUGUGU | 1688 | ACACAGGU CUGAUGAGGCCGUUAGGCCGAA IGCUGGAC | 5465 |
| 3619 | UCCAGCCC A CCUGUGUC | 1689 | GACACAGG CUGAUGAGGCCGUUAGGCCGAA IGGCUGGA | 5466 |
| 3621 | CAGCCCAC C UGUGUCAA | 1690 | UUGACACA CUGAUGAGGCCGUUAGGCCGAA IUGGGCUG | 5467 |
| 3622 | AGCCCACC U GUGUCAAC | 1691 | GUUGACAC CUGAUGAGGCCGUUAGGCCGAA IGUGGGCU | 5468 |
| 3628 | CCUGUGUC A ACAGCACA | 1692 | UGUGCUGU CUGAUGAGGCCGUUAGGCCGAA IACACAGG | 5469 |
| 3631 | GUGUCAAC A GCACAUUC | 1693 | GAAUGUGC CUGAUGAGGCCGUUAGGCCGAA IUUGACAC | 5470 |
| 3634 | UCAACAGC A CAUUCGAC | 1694 | GUCGAAUG CUGAUGAGGCCGUUAGGCCGAA ICUGUUGA | 5471 |
| 3636 | AACAGCAC A UUCGACAG | 1695 | CUGUCGAA CUGAUGAGGCCGUUAGGCCGAA IUGCUGUU | 5472 |
| 3643 | CAUUCGAC A GCCCUGCC | 1696 | GGCAGGGC CUGAUGAGGCCGUUAGGCCGAA IUCGAAUG | 5473 |
| 3646 | UCGACAGC C CUGCCCAC | 1697 | GUGGGCAG CUGAUGAGGCCGUUAGGCCGAA ICUGUCGA | 5474 |
| 3647 | CGACAGCC C UGCCCACU | 1698 | AGUGGGCA CUGAUGAGGCCGUUAGGCCGAA IGCUGUCG | 5475 |
| 3648 | GACAGCCC U GCCCACUG | 1699 | CAGUGGGC CUGAUGAGGCCGUUAGGCCGAA IGGCUGUC | 5476 |
| 3651 | AGCCCUGC C CACUGGGC | 1700 | GCCCAGUG CUGAUGAGGCCGUUAGGCCGAA ICAGGGCU | 5477 |
| 3652 | GCCCUGCC C ACUGGGCC | 1701 | GGCCCAGU CUGAUGAGGCCGUUAGGCCGAA IGCAGGGC | 5478 |
| 3653 | CCCUGCCC A CUGGGCCC | 1702 | GGGCCCAG CUGAUGAGGCCGUUAGGCCGAA IGGCAGGG | 5479 |
| 3655 | CUGCCCAC U GGGCCCAG | 1703 | CUGGGCCC CUGAUGAGGCCGUUAGGCCGAA IUGGGCAG | 5480 |
| 3660 | CACUGGGC C CAGAAAGG | 1704 | CCUUUCUG CUGAUGAGGCCGUUAGGCCGAA ICCCAGUG | 5481 |
| 3661 | ACUGGGCC C AGAAAGGC | 1705 | GCCUUUCU CUGAUGAGGCCGUUAGGCCGAA IGCCCAGU | 5482 |
| 3662 | CUGGGCCC A GAAAGGCA | 1706 | UGCCUUUC CUGAUGAGGCCGUUAGGCCGAA IGGCCCAG | 5483 |
| 3670 | AGAAAGGC A GCCACCAA | 1707 | UUGGUGGC CUGAUGAGGCCGUUAGGCCGAA ICCUUUCU | 5484 |
| 3673 | AAGGCAGC C ACCAAAUU | 1708 | AAUUUGGU CUGAUGAGGCCGUUAGGCCGAA ICUGCCUU | 5485 |
| 3674 | AGGCAGCC A CCAAAUUA | 1709 | UAAUUUGG CUGAUGAGGCCGUUAGGCCGAA IGCUGCCU | 5486 |
| 3676 | GCAGCCAC C AAAUUAGC | 1710 | GCUAAUUU CUGAUGAGGCCGUUAGGCCGAA IUGGCUGC | 5487 |
| 3677 | CAGCCACC A AAUUAGCC | 1711 | GGCUAAUU CUGAUGAGGCCGUUAGGCCGAA IGUGGCUG | 5488 |
| 3685 | AAAUUAGC C UGGACAAC | 1712 | GUUGUCCA CUGAUGAGGCCGUUAGGCCGAA ICUAAUUU | 5489 |
| 3686 | AAUUAGCC U GGACAACC | 1713 | GGUUGUCC CUGAUGAGGCCGUUAGGCCGAA IGCUAAUU | 5490 |
| 3691 | GCCUGGAC A ACCCUGAC | 1714 | GUCAGGGU CUGAUGAGGCCGUUAGGCCGAA IUCCAGGC | 5491 |
| 3694 | UGGACAAC C CUGACUAC | 1715 | GUAGUCAG CUGAUGAGGCCGUUAGGCCGAA IUUGUCCA | 5492 |
| 3695 | GGACAACC C UGACUACC | 1716 | GGUAGUCA CUGAUGAGGCCGUUAGGCCGAA IGUUGUCC | 5493 |
| 3696 | GACAACCC U GACUACCA | 1717 | UGGUAGUC CUGAUGAGGCCGUUAGGCCGAA IGGUUGUC | 5494 |
| 3700 | ACCCUGAC U ACCAGCAG | 1718 | CUGCUGGU CUGAUGAGGCCGUUAGGCCGAA IUCAGGGU | 5495 |
| 3703 | CUGACUAC C AGCAGGAC | 1719 | GUCCUGCU CUGAUGAGGCCGUUAGGCCGAA IUAGUCAG | 5496 |
| 3704 | UGACUACC A GCAGGACU | 1720 | AGUCCUGC CUGAUGAGGCCGUUAGGCCGAA IGUAGUCA | 5497 |
| 3707 | CUACCAGC A GGACUUCU | 1721 | AGAAGUCC CUGAUGAGGCCGUUAGGCCGAA ICUGGUAG | 5498 |
| 3712 | AGCAGGAC U UCUUUCCC | 1722 | GGGAAAGA CUGAUGAGGCCGUUAGGCCGAA IUCCUGCU | 5499 |
| 3715 | AGGACUUC U UUCCCAAG | 1723 | CUUGGGAA CUGAUGAGGCCGUUAGGCCGAA IAAGUCCU | 5500 |
| 3719 | CUUCUUUC C CAAGGAAG | 1724 | CUUCCUUG CUGAUGAGGCCGUUAGGCCGAA IAAAGAAG | 5501 |
| 3720 | UUCUUUCC C AAGGAAGC | 1725 | GCUUCCUU CUGAUGAGGCCGUUAGGCCGAA IGAAAGAA | 5502 |
| 3721 | UCUUUCCC A AGGAAGCC | 1726 | GGCUUCCU CUGAUGAGGCCGUUAGGCCGAA IGGAAAGA | 5503 |
| 3729 | AAGGAAGC C AAGCCAAA | 1727 | UUUGGCUU CUGAUGAGGCCGUUAGGCCGAA ICUUCCUU | 5504 |
| 3730 | AGGAAGCC A AGCCAAAU | 1728 | AUUUGGCU CUGAUGAGGCCGUUAGGCCGAA IGCUUCCU | 5505 |
| 3734 | AGCCAAGC C AAAUGGCA | 1729 | UGCCAUUU CUGAUGAGGCCGUUAGGCCGAA ICUUGGCU | 5506 |
| 3735 | GCCAAGCC A AAUGGCAU | 1730 | AUGCCAUU CUGAUGAGGCCGUUAGGCCGAA IGCUUGGC | 5507 |
| 3742 | CAAAUGGC A UCUUUAAG | 1731 | CUUAAAGA CUGAUGAGGCCGUUAGGCCGAA ICCAUUUG | 5508 |
| 3745 | AUGGCAUC U UUAAGGGC | 1732 | GCCCUUAA CUGAUGAGGCCGUUAGGCCGAA IAUGCCAU | 5509 |
| 3754 | UUAAGGGC U CCACAGCU | 1733 | AGCUGUGG CUGAUGAGGCCGUUAGGCCGAA ICCCUUAA | 5510 |
| 3756 | AAGGGCUC C ACAGCUGA | 1734 | UCAGCUGU CUGAUGAGGCCGUUAGGCCGAA IAGCCCUU | 5511 |
| 3757 | AGGGCUCC A CAGCUGAA | 1735 | UUCAGCUG CUGAUGAGGCCGUUAGGCCGAA IGAGCCCU | 5512 |
| 3759 | GGCUCCAC A GCUGAAAA | 1736 | UUUUCAGC CUGAUGAGGCCGUUAGGCCGAA IUGGAGCC | 5513 |
| 3762 | UCCACAGC U GAAAAUGC | 1737 | GCAUUUUC CUGAUGAGGCCGUUAGGCCGAA ICUGUGGA | 5514 |
| 3771 | GAAAAUGC A GAAUACCU | 1738 | AGGUAUUC CUGAUGAGGCCGUUAGGCCGAA ICAUUUUC | 5515 |
| 3778 | CAGAAUAC C UAAGGGUC | 1739 | GACCCUUA CUGAUGAGGCCGUUAGGCCGAA IUAUUCUG | 5516 |
| 3779 | AGAAUACC U AAGGGUCG | 1740 | CGACCCUU CUGAUGAGGCCGUUAGGCCGAA IGUAUUCU | 5517 |
| 3791 | GGUCGCGC C ACAAAGCA | 1741 | UGCUUUGU CUGAUGAGGCCGUUAGGCCGAA ICGCGACC | 5518 |
| 3792 | GUCGCGCC A CAAAGCAG | 1742 | CUGCUUUG CUGAUGAGGCCGUUAGGCCGAA IGCGCGAC | 5519 |
| 3794 | CGCGCCAC A AAGCAGUG | 1743 | CACUGCUU CUGAUGAGGCCGUUAGGCCGAA IUGGCGCG | 5520 |
| 3799 | CACAAAGC A GUGAAUUU | 1744 | AAAUUCAC CUGAUGAGGCCGUUAGGCCGAA ICUUUGUG | 5521 |
| 3816 | AUUGGAGC A UGACCACG | 1745 | CGUGGUCA CUGAUGAGGCCGUUAGGCCGAA ICUCCAAU | 5522 |
| 3821 | AGCAUGAC C ACGGAGGA | 1746 | UCCUCCGU CUGAUGAGGCCGUUAGGCCGAA IUCAUGCU | 5523 |
| 3822 | GCAUGACC A CGGAGGAU | 1747 | AUCCUCCG CUGAUGAGGCCGUUAGGCCGAA IGUCAUGC | 5524 |
| 3840 | GUAUGAGC C CUAAAAAU | 1748 | AUUUUUAG CUGAUGAGGCCGUUAGGCCGAA ICUCAUAC | 5525 |
| 3841 | UAUGAGCC C UAAAAAUC | 1749 | GAUUUUUA CUGAUGAGGCCGUUAGGCCGAA IGCUCAUA | 5526 |
| 3842 | AUGAGCCC U AAAAAUCC | 1750 | GGAUUUUU CUGAUGAGGCCGUUAGGCCGAA IGGCUCAU | 5527 |
| 3850 | UAAAAAUC C AGACUCUU | 1751 | AAGAGUCU CUGAUGAGGCCGUUAGGCCGAA IAUUUUUA | 5528 |
| 3851 | AAAAAUCC A GACUCUUU | 1752 | AAAGAGUC CUGAUGAGGCCGUUAGGCCGAA IGAUUUUU | 5529 |
| 3855 | AUCCAGAC U CUUUCGAU | 1753 | AUCGAAAG CUGAUGAGGCCGUUAGGCCGAA IUCUGGAU | 5530 |
| 3857 | CCAGACUC U UUCGAUAC | 1754 | GUAUCGAA CUGAUGAGGCCGUUAGGCCGAA IAGUCUGG | 5531 |
| 3866 | UUCGAUAC C CAGGACCA | 1755 | UGGUCCUG CUGAUGAGGCCGUUAGGCCGAA IUAUCGAA | 5532 |
| 3867 | UCGAUACC C AGGACCAA | 1756 | UUGGUCCU CUGAUGAGGCCGUUAGGCCGAA IGUAUCGA | 5533 |
| 3868 | CGAUACCC A GGACCAAG | 1757 | CUUGGUCC CUGAUGAGGCCGUUAGGCCGAA IGGUAUCG | 5534 |
| 3873 | CCCAGGAC C AAGCCACA | 1758 | UGUGGCUU CUGAUGAGGCCGUUAGGCCGAA IUCCUGGG | 5535 |
| 3874 | CCAGGACC A AGCCACAG | 1759 | CUGUGGCU CUGAUGAGGCCGUUAGGCCGAA IGUCCUGG | 5536 |
| 3878 | GACCAAGC C ACAGCAGG | 1760 | CCUGCUGU CUGAUGAGGCCGUUAGGCCGAA ICUUGGUC | 5537 |
| 3879 | ACCAAGCC A CAGCAGGU | 1761 | ACCUGCUG CUGAUGAGGCCGUUAGGCCGAA IGCUUGGU | 5538 |
| 3881 | CAAGCCAC A GCAGGUCC | 1762 | GGACCUGC CUGAUGAGGCCGUUAGGCCGAA IUGGCUUG | 5539 |
| 3884 | GCCACAGC A GGUCCUCC | 1763 | GGAGGACC CUGAUGAGGCCGUUAGGCCGAA ICUGUGGC | 5540 |
| 3889 | AGCAGGUC C UCCAUCCC | 1764 | GGGAUGGA CUGAUGAGGCCGUUAGGCCGAA IACCUGCU | 5541 |
| 3890 | GCAGGUCC U CCAUCCCA | 1765 | UGGGAUGG CUGAUGAGGCCGUUAGGCCGAA IGACCUGC | 5542 |
| 3892 | AGGUCCUC C AUCCCAAC | 1766 | GUUGGGAU CUGAUGAGGCCGUUAGGCCGAA IAGGACCU | 5543 |
| 3893 | GGUCCUCC A UCCCAACA | 1767 | UGUUGGGA CUGAUGAGGCCGUUAGGCCGAA IGAGGACC | 5544 |
| 3896 | CCUCCAUC C CAACAGCC | 1768 | GGCUGUUG CUGAUGAGGCCGUUAGGCCGAA IAUGGAGG | 5545 |
| 3897 | CUCCAUCC C AACAGCCA | 1769 | UGGCUGUU CUGAUGAGGCCGUUAGGCCGAA IGAUGGAG | 5546 |
| 3898 | UCCAUCCC A ACAGCCAU | 1770 | AUGGCUGU CUGAUGAGGCCGUUAGGCCGAA IGGAUGGA | 5547 |
| 3901 | AUCCCAAC A GCCAUGCC | 1771 | GGCAUGGC CUGAUGAGGCCGUUAGGCCGAA IUUGGGAU | 5548 |
| 3904 | CCAACAGC C AUGCCCGC | 1772 | GCGGGCAU CUGAUGAGGCCGUUAGGCCGAA ICUGUUGG | 5549 |
| 3905 | CAACAGCC A UGCCCGCA | 1773 | UGCGGGCA CUGAUGAGGCCGUUAGGCCGAA IGCUGUUG | 5550 |
| 3909 | AGCCAUGC C CGCAUUAG | 1774 | CUAAUGCG CUGAUGAGGCCGUUAGGCCGAA ICAUGGCU | 5551 |
| 3910 | GCCAUGCC C GCAUUAGC | 1775 | GCUAAUGC CUGAUGAGGCCGUUAGGCCGAA IGCAUGGC | 5552 |
| 3913 | AUGCCCGC A UUAGCUCU | 1776 | AGAGCUAA CUGAUGAGGCCGUUAGGCCGAA ICGGGCAU | 5553 |
| 3919 | GCAUUAGC U CUUAGACC | 1777 | GGUCUAAG CUGAUGAGGCCGUUAGGCCGAA ICUAAUGC | 5554 |
| 3921 | AUUAGCUC U UAGACCCA | 1778 | UGGGUCUA CUGAUGAGGCCGUUAGGCCGAA IAGCUAAU | 5555 |
| 3927 | UCUUAGAC C CACAGACU | 1779 | AGUCUGUG CUGAUGAGGCCGUUAGGCCGAA IUCUAAGA | 5556 |
| 3928 | CUUAGACC C ACAGACUG | 1780 | CAGUCUGU CUGAUGAGGCCGUUAGGCCGAA IGUCUAAG | 5557 |
| 3929 | UUAGACCC A CAGACUGG | 1781 | CCAGUCUG CUGAUGAGGCCGUUAGGCCGAA IGGUCUAA | 5558 |
| 3931 | AGACCCAC A GACUGGUU | 1782 | AACCAGUC CUGAUGAGGCCGUUAGGCCGAA IUGGGUCU | 5559 |
| 3935 | CCACAGAC U GGUUUUGC | 1783 | GCAAAACC CUGAUGAGGCCGUUAGGCCGAA IUCUGUGG | 5560 |
| 3944 | GGUUUUGC A ACGUUUAC | 1784 | GUAAACGU CUGAUGAGGCCGUUAGGCCGAA ICAAAACC | 5561 |
| 3953 | ACGUUUAC A CCGACUAG | 1785 | CUAGUCGG CUGAUGAGGCCGUUAGGCCGAA IUAAACGU | 5562 |
| 3955 | GUUUACAC C GACUAGCC | 1786 | GGCUAGUC CUGAUGAGGCCGUUAGGCCGAA IUGUAAAC | 5563 |
| 3959 | ACACCGAC U AGCCAGGA | 1787 | UCCUGGCU CUGAUGAGGCCGUUAGGCCGAA IUCGGUGU | 5564 |
| 3963 | CGACUAGC C AGGAAGUA | 1788 | UACUUCCU CUGAUGAGGCCGUUAGGCCGAA ICUAGUCG | 5565 |
| 3964 | GACUAGCC A GGAAGUAC | 1789 | GUACUUCC CUGAUGAGGCCGUUAGGCCGAA IGCUAGUC | 5566 |
| 3973 | GGAAGUAC U UCCACCUC | 1790 | GAGGUGGA CUGAUGAGGCCGUUAGGCCGAA IUACUUCC | 5567 |
| 3976 | AGUACUUC C ACCUCGGG | 1792 | CCCGAGGU CUGAUGAGGCCGUUAGGCCGAA IAAGUACU | 5568 |
| 3977 | GUACUUCC A CCUCGGGC | 1792 | GCCCGAGG CUGAUGAGGCCGUUAGGCCGAA IGAAGUAC | 5569 |
| 3979 | ACUUCCAC C UCGGGCAC | 1793 | GUGCCCGA CUGAUGAGGCCGUUAGGCCGAA IUGGAAGU | 5570 |
| 3980 | CUUCCACC U CGGGCACA | 1794 | UGUGCCCG CUGAUGAGGCCGUUAGGCCGAA IGUGGAAG | 5571 |
| 3986 | CCUCGGGC A CAUUUUGG | 1795 | CCAAAAUG CUGAUGAGGCCGUUAGGCCGAA ICCCGAGG | 5572 |
| 3988 | UCGGGCAC A UUUUGGGA | 1796 | UCCCAAAA CUGAUGAGGCCGUUAGGCCGAA IUGCCCGA | 5573 |
| 4003 | GAAGUUGC A UUCCUUUG | 1797 | CAAAGGAA CUGAUGAGGCCGUUAGGCCGAA ICAACUUC | 5574 |
| 4007 | UUGCAUUC C UUUGUCUU | 1798 | AAGACAAA CUGAUGAGGCCGUUAGGCCGAA IAAUGCAA | 5575 |
| 4008 | UGCAUUCC U UUGUCUUC | 1799 | GAAGACAA CUGAUGAGGCCGUUAGGCCGAA IGAAUGCA | 5576 |
| 4014 | CCUUUGUC U UCAAACUG | 1800 | CAGUUUGA CUGAUGAGGCCGUUAGGCCGAA IACAAAGG | 5577 |
| 4017 | UUGUCUUC A AACUGUGA | 1801 | UCACAGUU CUGAUGAGGCCGUUAGGCCGAA IAAGACAA | 5578 |
| 4021 | CUUCAAAC U GUGAAGCA | 1802 | UGCUUCAC CUGAUGAGGCCGUUAGGCCGAA IUUUGAAG | 5579 |
| 4029 | UGUGAAGC A UUUACAGA | 1803 | UCUGUAAA CUGAUGAGGCCGUUAGGCCGAA ICUUCACA | 5580 |
| 4035 | GCAUUUAC A GAAACGCA | 1804 | UGCGUUUC CUGAUGAGGCCGUUAGGCCGAA IUAAAUGC | 5581 |
| 4043 | AGAAACGC A UCCAGCAA | 1805 | UUGCUGGA CUGAUGAGGCCGUUAGGCCGAA ICGUUUCU | 5582 |
| 4046 | AACGCAUC C AGCAAGAA | 1806 | UUCUUGCU CUGAUGAGGCCGUUAGGCCGAA IAUGCGUU | 5583 |
| 4047 | ACGCAUCC A GCAAGAAU | 1807 | AUUCUUGC CUGAUGAGGCCGUUAGGCCGAA IGAUGCGU | 5584 |
| 4050 | CAUCCAGC A AGAAUAUU | 1808 | AAUAUUCU CUGAUGAGGCCGUUAGGCCGAA ICUGGAUG | 5585 |
| 4062 | AUAUUGUC C CUUUGAGC | 1809 | GCUCAAAG CUGAUGAGGCCGUUAGGCCGAA IACAAUAU | 5586 |
| 4063 | UAUUGUCC C UUUGAGCA | 1810 | UGCUCAAA CUGAUGAGGCCGUUAGGCCGAA IGACAAUA | 5587 |
| 4064 | AUUGUCCC U UUGAGCAG | 1811 | CUGCUCAA CUGAUGAGGCCGUUAGGCCGAA IGGACAAU | 5588 |
| 4071 | CUUUGAGC A GAAAUUUA | 1812 | UAAAUUUC CUGAUGAGGCCGUUAGGCCGAA ICUCAAAG | 5589 |
| 4082 | AAUUUAUC U UUCAAAGA | 1813 | UCUUUGAA CUGAUGAGGCCGUUAGGCCGAA IAUAAAUU | 5590 |
| 4086 | UAUCUUUC A AAGAGGUA | 1814 | UACCUCUU CUGAUGAGGCCGUUAGGCCGAA IAAAGAUA | 5591 |
| 4148 | UGGGGAUC U UGGAGUUU | 1815 | AAACUCCA CUGAUGAGGCCGUUAGGCCGAA IAUCCCCA | 5592 |
| 4160 | AGUUUUUC A UUGUCGCU | 1816 | AGCGACAA CUGAUGAGGCCGUUAGGCCGAA IAAAAACU | 5593 |
| 4168 | AUUGUCGC U AUUGAUUU | 1817 | AAAUCAAU CUGAUGAGGCCGUUAGGCCGAA ICGACAAU | 5594 |
| 4181 | AUUUUUAC U UCAAUGGG | 1818 | CCCAUUGA CUGAUGAGGCCGUUAGGCCGAA IUAAAAAU | 5595 |
| 4184 | UUUACUUC A AUGGGCUC | 1819 | GAGCCCAU CUGAUGAGGCCGUUAGGCCGAA IAAGUAAA | 5596 |
| 4191 | CAAUGGGC U CUUCCAAC | 1820 | GUUGGAAG CUGAUGAGGCCGUUAGGCCGAA ICCCAUUG | 5597 |
| 4193 | AUGGGCUC U UCCAACAA | 1821 | UUGUUGGA CUGAUGAGGCCGUUAGGCCGAA IAGCCCAU | 5598 |
| 4196 | GGCUCUUC C AACAAGGA | 1822 | UCCUUGUU CUGAUGAGGCCGUUAGGCCGAA IAAGAGCC | 5599 |
| 4197 | GCUCUUCC A ACAAGGAA | 1823 | UUCCUUGU CUGAUGAGGCCGUUAGGCCGAA IGAAGAGC | 5600 |
| 4200 | CUUCCAAC A AGGAAGAA | 1824 | UUCUUCCU CUGAUGAGGCCGUUAGGCCGAA IUUGGAAG | 5601 |
| 4211 | GAAGAAGC U UGCUGGUA | 1825 | UACCAGCA CUGAUGAGGCCGUUAGGCCGAA ICUUCUUC | 5602 |
| 4215 | AAGCUUGC U GGUAGCAC | 1826 | GUGCUACC CUGAUGAGGCCGUUAGGCCGAA ICAAGCUU | 5603 |
| 4222 | CUGGUAGC A CUUGCUAC | 1827 | GUAGCAAG CUGAUGAGGCCGUUAGGCCGAA ICUACCAG | 5604 |
| 4224 | GGUAGCAC U UGCUACCC | 1828 | GGGUAGCA CUGAUGAGGCCGUUAGGCCGAA IUGCUACC | 5605 |
| 4228 | GCACUUGC U ACCCUGAG | 1829 | CUCAGGGU CUGAUGAGGCCGUUAGGCCGAA ICAAGUGC | 5606 |
| 4231 | CUUGCUAC C CUGAGUUC | 1830 | GAACUCAG CUGAUGAGGCCGUUAGGCCGAA IUAGCAAG | 5607 |
| 4232 | UUGCUACC C UGAGUUCA | 1831 | UGAACUCA CUGAUGAGGCCGUUAGGCCGAA IGUAGCAA | 5608 |
| 4233 | UGCUACCC U GAGUUCAU | 1832 | AUGAACUC CUGAUGAGGCCGUUAGGCCGAA IGGUAGCA | 5609 |
| 4240 | CUGAGUUC A UCCAGGCC | 1833 | GGCCUGGA CUGAUGAGGCCGUUAGGCCGAA IAACUCAG | 5610 |
| 4243 | AGUUCAUC C AGGCCCAA | 1834 | UUGGGCCU CUGAUGAGGCCGUUAGGCCGAA IAUGAACU | 5611 |
| 4244 | GUUCAUCC A GGCCCAAC | 1835 | GUUGGGCC CUGAUGAGGCCGUUAGGCCGAA IGAUGAAC | 5612 |
| 4248 | AUCCAGGC C CAACUGUG | 1836 | CACAGUUG CUGAUGAGGCCGUUAGGCCGAA ICCUGGAU | 5613 |
| 4249 | UCCAGGCC C AACUGUGA | 1837 | UCACAGUU CUGAUGAGGCCGUUAGGCCGAA IGCCUGGA | 5614 |
| 4250 | CCAGGCCC A ACUGUGAG | 1838 | CUCACAGU CUGAUGAGGCCGUUAGGCCGAA IGGCCUGG | 5615 |
| 4253 | GGCCCAAC U GUGAGCAA | 1839 | UUGCUCAC CUGAUGAGGCCGUUAGGCCGAA IUUGGGCC | 5616 |
| 4260 | CUGUGAGC A AGGAGCAC | 1840 | GUGCUCCU CUGAUGAGGCCGUUAGGCCGAA ICUCACAG | 5617 |
| 4267 | CAAGGAGC A CAAGCCAC | 1841 | GUGGCUUG CUGAUGAGGCCGUUAGGCCGAA ICUCCUUG | 5618 |
| 4269 | AGGAGCAC A AGCCACAA | 1842 | UUGUGGCU CUGAUGAGGCCGUUAGGCCGAA IUGCUCCU | 5619 |
| 4273 | GCACAAGC C ACAAGUCU | 1843 | AGACUUGU CUGAUGAGGCCGUUAGGCCGAA ICUUGUGC | 5620 |
| 4274 | CACAAGCC A CAAGUCUU | 1844 | AAGACUUG CUGAUGAGGCCGUUAGGCCGAA IGCUUGUG | 5621 |
| 4276 | CAAGCCAC A AGUCUUCC | 1845 | GGAAGACU CUGAUGAGGCCGUUAGGCCGAA IUGGCUUG | 5622 |
| 4281 | CACAAGUC U UCCAGAGG | 1846 | CCUCUGGA CUGAUGAGGCCGUUAGGCCGAA IACUUGUG | 5623 |
| 4284 | AAGUCUUC C AGAGGAUG | 1847 | CAUCCUCU CUGAUGAGGCCGUUAGGCCGAA IAAGACUU | 5624 |
| 4285 | AGUCUUCC A GAGGAUGC | 1848 | GCAUCCUC CUGAUGAGGCCGUUAGGCCGAA IGAAGACU | 5625 |
| 4294 | GAGGAUGC U UGAUUCCA | 1849 | UGGAAUCA CUGAUGAGGCCGUUAGGCCGAA ICAUCCUC | 5626 |
| 4301 | CUUGAUUC C AGUGGUUC | 1850 | GAACCACU CUGAUGAGGCCGUUAGGCCGAA IAAUCAAG | 5627 |
| 4302 | UUGAUUCC A GUGGUUCU | 1851 | AGAACCAC CUGAUGAGGCCGUUAGGCCGAA IGAAUCAA | 5628 |
| 4310 | AGUGGUUC U GCUUCAAG | 1852 | CUUGAAGC CUGAUGAGGCCGUUAGGCCGAA IAACCACU | 5629 |
| 4313 | GGUUCUGC U UCAAGGCU | 1853 | AGCCUUGA CUGAUGAGGCCGUUAGGCCGAA ICAGAACC | 5630 |
| 4316 | UCUGCUUC A AGGCUUCC | 1854 | GGAAGCCU CUGAUGAGGCCGUUAGGCCGAA IAAGCAGA | 5631 |
| 4321 | UUCAAGGC U UCCACUGC | 1855 | GCAGUGGA CUGAUGAGGCCGUUAGGCCGAA ICCUUGAA | 5632 |
| 4324 | AAGGCUUC C ACUGCAAA | 1856 | UUUGCAGU CUGAUGAGGCCGUUAGGCCGAA IAAGCCUU | 5633 |
| 4325 | AGGCUUCC A CUGCAAAA | 1857 | UUUUGCAG CUGAUGAGGCCGUUAGGCCGAA IGAAGCCU | 5634 |
| 4327 | GCUUCCAC U GCAAAACA | 1858 | UGUUUUGC CUGAUGAGGCCGUUAGGCCGAA IUGGAAGC | 5635 |
| 4330 | UCCACUGC A AAACACUA | 1859 | UAGUGUUU CUGAUGAGGCCGUUAGGCCGAA ICAGUGGA | 5636 |
| 4335 | UGCAAAAC A CUAAAGAU | 1860 | AUCUUUAG CUGAUGAGGCCGUUAGGCCGAA IUUUUGCA | 5637 |
| 4337 | CAAAACAC U AAAGAUCC | 1861 | GGAUCUUU CUGAUGAGGCCGUUAGGCCGAA IUGUUUUG | 5638 |
| 4345 | UAAAGAUC C AAGAAGGC | 1862 | GCCUUCUU CUGAUGAGGCCGUUAGGCCGAA IAUCUUUA | 5639 |
| 4346 | AAAGAUCC A AGAAGGCC | 1863 | GGCCUUCU CUGAUGAGGCCGUUAGGCCGAA IGAUCUUU | 5640 |
| 4354 | AAGAAGGC C UUCAUGGC | 1864 | GCCAUGAA CUGAUGAGGCCGUUAGGCCGAA ICCUUCUU | 5641 |
| 4355 | AGAAGGCC U UCAUGGCC | 1865 | GGCCAUGA CUGAUGAGGCCGUUAGGCCGAA IGCCUUCU | 5642 |
| 4358 | AGGCCUUC A UGGCCCCA | 1866 | UGGGGCCA CUGAUGAGGCCGUUAGGCCGAA IAAGGCCU | 5643 |
| 4363 | UUCAUGGC C CCAGCAGG | 1867 | CCUGCUGG CUGAUGAGGCCGUUAGGCCGAA ICCAUGAA | 5644 |
| 4364 | UCAUGGCC C CAGCAGGC | 1868 | GCCUGCUG CUGAUGAGGCCGUUAGGCCGAA IGCCAUGA | 5645 |
| 4365 | CAUGGCCC C AGCAGGCC | 1869 | GGCCUGCU CUGAUGAGGCCGUUAGGCCGAA IGGCCAUG | 5646 |
| 4366 | AUGGCCCC A GCAGGCCG | 1870 | CGGCCUGC CUGAUGAGGCCGUUAGGCCGAA IGGGCCAU | 5647 |
| 4369 | GCCCCAGC A GGCCGGAU | 1871 | AUCCGGCC CUGAUGAGGCCGUUAGGCCGAA ICUGGGGC | 5648 |
| 4373 | CAGCAGGC C GGAUCGGU | 1872 | ACCGAUCC CUGAUGAGGCCGUUAGGCCGAA ICCUGCUG | 5649 |
| 4384 | AUCGGUAC U GUAUCAAG | 1873 | CUUGAUAC CUGAUGAGGCCGUUAGGCCGAA IUACCGAU | 5650 |
| 4390 | ACUGUAUC A AGUCAUGG | 1874 | CCAUGACU CUGAUGAGGCCGUUAGGCCGAA IAUACAGU | 5651 |
| 4395 | AUCAAGUC A UGGCAGGU | 1875 | ACCUGCCA CUGAUGAGGCCGUUAGGCCGAA IACUUGAU | 5652 |
| 4400 | GUCAUGGC A GGUACAGU | 1876 | ACUGUACC CUGAUGAGGCCGUUAGGCCGAA ICCAUGAC | 5653 |
| 4406 | GCAGGUAC A GUAGGAUA | 1877 | UAUCCUAC CUGAUGAGGCCGUUAGGCCGAA IUACCUGC | 5654 |
| 4418 | GGAUAAGC C ACUCUGUC | 1878 | GACAGAGU CUGAUGAGGCCGUUAGGCCGAA ICUUAUCC | 5655 |
| 4419 | GAUAAGCC A CUCUGUCC | 1879 | GGACAGAG CUGAUGAGGCCGUUAGGCCGAA IGCUUAUC | 5656 |
| 4421 | UAAGCCAC U CUGUCCCU | 1880 | AGGGACAG CUGAUGAGGCCGUUAGGCCGAA IUGGCUUA | 5657 |
| 4423 | AGCCACUC U GUCCCUUC | 1881 | GAAGGGAC CUGAUGAGGCCGUUAGGCCGAA IAGUGGCU | 5658 |
| 4427 | ACUCUGUC C CUUCCUGG | 1882 | CCAGGAAG CUGAUGAGGCCGUUAGGCCGAA IACAGAGU | 5659 |
| 4428 | CUCUGUCC C UUCCUGGG | 1883 | CCCAGGAA CUGAUGAGGCCGUUAGGCCGAA IGACAGAG | 5660 |
| 4429 | UCUGUCCC U UCCUGGGC | 1884 | GCCCAGGA CUGAUGAGGCCGUUAGGCCGAA IGGACAGA | 5661 |
| 4432 | GUCCCUUC C UGGGCAAA | 1885 | UUUGCCCA CUGAUGAGGCCGUUAGGCCGAA IAAGGGAC | 5662 |
| 4433 | UCCCUUCC U GGGCAAAG | 1886 | CUUUGCCC CUGAUGAGGCCGUUAGGCCGAA IGAAGGGA | 5663 |
| 4438 | UCCUGGGC A AAGAAGAA | 1887 | UUCUUCUU CUGAUGAGGCCGUUAGGCCGAA ICCCAGGA | 5664 |
| 4464 | AUGAAUUC U UCCUUAGA | 1888 | UCUAAGGA CUGAUGAGGCCGUUAGGCCGAA IAAUUCAU | 5665 |
| 4467 | AAUUCUUC C UUAGACUU | 1889 | AAGUCUAA CUGAUGAGGCCGUUAGGCCGAA IAAGAAUU | 5666 |
| 4468 | AUUCUUCC U UAGACUUA | 1890 | UAAGUCUA CUGAUGAGGCCGUUAGGCCGAA IGAAGAAU | 5667 |
| 4474 | CCUUAGAC U UACUUUUG | 1891 | CAAAAGUA CUGAUGAGGCCGUUAGGCCGAA IUCUAAGG | 5668 |
| 4478 | AGACUUAC U UUUGUAAA | 1892 | UUUACAAA CUGAUGAGGCCGUUAGGCCGAA IUAAGUCU | 5669 |
| 4493 | AAAAUGUC C CCACGGUA | 1893 | UACCGUGG CUGAUGAGGCCGUUAGGCCGAA IACAUUUU | 5670 |
| 4494 | AAAUGUCC C CACGGUAC | 1894 | GUACCGUG CUGAUGAGGCCGUUAGGCCGAA IGACAUUU | 5671 |
| 4495 | AAUGUCCC C ACGGUACU | 1895 | AGUACCGU CUGAUGAGGCCGUUAGGCCGAA IGGACAUU | 5672 |
| 4496 | AUGUCCCC A CGGUACUU | 1896 | AAGUACCG CUGAUGAGGCCGUUAGGCCGAA IGGGACAU | 5673 |
| 4503 | CACGGUAC U UACUCCCC | 1897 | GGGGAGUA CUGAUGAGGCCGUUAGGCCGAA IUACCGUG | 5674 |
| 4507 | GUACUUAC U CCCCACUG | 1898 | CAGUGGGG CUGAUGAGGCCGUUAGGCCGAA IUAAGUAC | 5675 |
| 4509 | ACUUACUC C CCACUGAU | 1899 | AUCAGUGG CUGAUGAGGCCGUUAGGCCGAA IAGUAAGU | 5676 |
| 4510 | CUUACUCC C CACUGAUG | 1900 | CAUCAGUG CUGAUGAGGCCGUUAGGCCGAA IGAGUAAG | 5677 |
| 4511 | UUACUCCC C ACUGAUGG | 1901 | CCAUCAGU CUGAUGAGGCCGUUAGGCCGAA IGGAGUAA | 5678 |
| 4512 | UACUCCCC A CUGAUGGA | 1902 | UCCAUCAG CUGAUGAGGCCGUUAGGCCGAA IGGGAGUA | 5679 |
| 4514 | CUCCCCAC U GAUGGACC | 1903 | GGUCCAUC CUGAUGAGGCCGUUAGGCCGAA IUGGGGAG | 5680 |
| 4522 | UGAUGGAC C AGUGGUUU | 1904 | AAACCACU CUGAUGAGGCCGUUAGGCCGAA IUCCAUCA | 5681 |
| 4523 | GAUGGACC A GUGGUUUC | 1905 | GAAACCAC CUGAUGAGGCCGUUAGGCCGAA IGUCCAUC | 5682 |
| 4532 | GUGGUUUC C AGUCAUGA | 1906 | UCAUGACU CUGAUGAGGCCGUUAGGCCGAA IAAACCAC | 5683 |
| 4533 | UGGUUUCC A GUCAUGAG | 1907 | CUCAUGAC CUGAUGAGGCCGUUAGGCCGAA IGAAACCA | 5684 |
| 4537 | UUCCAGUC A UGAGCGUU | 1908 | AACGCUCA CUGAUGAGGCCGUUAGGCCGAA IACUGGAA | 5685 |
| 4550 | CGUUAGAC U GACUUGUU | 1909 | AACAAGUC CUGAUGAGGCCGUUAGGCCGAA IUCUAACG | 5686 |
| 4554 | AGACUGAC U UGUUUGUC | 1910 | GACAAACA CUGAUGAGGCCGUUAGGCCGAA IUCAGUCU | 5687 |
| 4563 | UGUUUGUC U UCCAUUCC | 1911 | GGAAUGGA CUGAUGAGGCCGUUAGGCCGAA IACAAACA | 5688 |
| 4566 | UUGUCUUC C AUUCCAUU | 1912 | AAUGGAAU CUGAUGAGGCCGUUAGGCCGAA IAAGACAA | 5689 |
| 4567 | UGUCUUCC A UUCCAUUG | 1913 | CAAUGGAA CUGAUGAGGCCGUUAGGCCGAA IGAAGACA | 5690 |
| 4571 | UUCCAUUC C AUUGUUUU | 1914 | AAAACAAU CUGAUGAGGCCGUUAGGCCGAA IAAUGGAA | 5691 |
| 4572 | UCCAUUCC A UUGUUUUG | 1915 | CAAAACAA CUGAUGAGGCCGUUAGGCCGAA IGAAUGGA | 5692 |
| 4585 | UUUGAAAC U CAGUAUGC | 1916 | GCAUACUG CUGAUGAGGCCGUUAGGCCGAA IUUUCAAA | 5693 |
| 4587 | UGAAACUC A GUAUGCCG | 1917 | CGGCAUAC CUGAUGAGGCCGUUAGGCCGAA IAGUUUCA | 5694 |
| 4594 | CAGUAUGC C GCCCCUGU | 1918 | ACAGGGGC CUGAUGAGGCCGUUAGGCCGAA ICAUACUG | 5695 |
| 4597 | UAUGCCGC C CCUGUCUU | 1919 | AAGACAGG CUGAUGAGGCCGUUAGGCCGAA ICGGCAUA | 5696 |
| 4598 | AUGCCGCC C CUGUCUUG | 1920 | CAAGACAG CUGAUGAGGCCGUUAGGCCGAA IGCGGCAU | 5697 |
| 4599 | UGCCGCCC C UGUCUUGC | 1921 | GCAAGACA CUGAUGAGGCCGUUAGGCCGAA IGGCGGCA | 5698 |
| 4600 | GCCGCCCC U GUCUUGCU | 1922 | AGCAAGAC CUGAUGAGGCCGUUAGGCCGAA IGGGCGGC | 5699 |
| 4604 | CCCCUGUC U UGCUGUCA | 1923 | UGACAGCA CUGAUGAGGCCGUUAGGCCGAA IACAGGGG | 5700 |
| 4608 | UGUCUUGC U GUCAUGAA | 1924 | UUCAUGAC CUGAUGAGGCCGUUAGGCCGAA ICAAGACA | 5701 |
| 4612 | UUGCUGUC A UGAAAUCA | 1925 | UGAUUUCA CUGAUGAGGCCGUUAGGCCGAA IACAGCAA | 5702 |
| 4620 | AUGAAAUC A GCAAGAGA | 1926 | UCUCUUGC CUGAUGAGGCCGUUAGGCCGAA IAUUUCAU | 5703 |
| 4623 | AAAUCAGC A AGAGAGGA | 1927 | UCCUCUCU CUGAUGAGGCCGUUAGGCCGAA ICUGAUUU | 5704 |
| 4636 | AGGAUGAC A CAUCAAAU | 1928 | AUUUGAUG CUGAUGAGGCCGUUAGGCCGAA IUCAUCCU | 5705 |
| 4638 | GAUGACAC A UCAAAUAA | 1929 | UUAUUUGA CUGAUGAGGCCGUUAGGCCGAA IUGUCAUC | 5706 |
| 4641 | GACACAUC A AAUAAUAA | 1930 | UUAUUAUU CUGAUGAGGCCGUUAGGCCGAA IAUGUGUC | 5707 |
| 4651 | AUAAUAAC U CGGAUUCC | 1931 | GGAAUCCG CUGAUGAGGCCGUUAGGCCGAA IUUAUUAU | 5708 |
| 4659 | UCGGAUUC C AGCCCACA | 1932 | UGUGGGCU CUGAUGAGGCCGUUAGGCCGAA IAAUCCGA | 5709 |
| 4660 | CGGAUUCC A GCCCACAU | 1933 | AUGUGGGC CUGAUGAGGCCGUUAGGCCGAA IGAAUCCG | 5710 |
| 4663 | AUUCCAGC C CACAUUGG | 1934 | CCAAUGUG CUGAUGAGGCCGUUAGGCCGAA ICUGGAAU | 5711 |
| 4664 | UUCCAGCC C ACAUUGGA | 1935 | UCCAAUGU CUGAUGAGGCCGUUAGGCCGAA IGCUGGAA | 5712 |
| 4665 | UCCAGCCC A CAUUGGAU | 1936 | AUCCAAUG CUGAUGAGGCCGUUAGGCCGAA IGGCUGGA | 5713 |
| 4667 | CAGCCCAC A UUGGAUUC | 1937 | GAAUCCAA CUGAUGAGGCCGUUAGGCCGAA IUGGGCUG | 5714 |
| 4676 | UUGGAUUC A UCAGCAUU | 1938 | AAUGCUGA CUGAUGAGGCCGUUAGGCCGAA IAAUCCAA | 5715 |
| 4679 | GAUUCAUC A GCAUUUGG | 1939 | CCAAAUGC CUGAUGAGGCCGUUAGGCCGAA IAUGAAUC | 5716 |
| 4682 | UCAUCAGC A UUUGGACC | 1940 | GGUCCAAA CUGAUGAGGCCGUUAGGCCGAA ICUGAUGA | 5717 |
| 4690 | AUUUGGAC C AAUAGCCC | 1941 | GGGCUAUU CUGAUGAGGCCGUUAGGCCGAA IUCCAAAU | 5718 |
| 4691 | UUUGGACC A AUAGCCCA | 1942 | UGGGCUAU CUGAUGAGGCCGUUAGGCCGAA IGUCCAAA | 5719 |
| 4697 | CCAAUAGC C CACAGCUG | 1943 | CACCUGUG CUGAUGAGGCCGUUAGGCCGAA ICUAUUGG | 5720 |
| 4698 | CAAUAGCC C ACAGCUGA | 1944 | UCAGCUGU CUGAUGAGGCCGUUAGGCCGAA IGCUAUUG | 5721 |
| 4699 | AAUAGCCC A CAGCUGAG | 1945 | CUCAGCUG CUGAUGAGGCCGUUAGGCCGAA IGGCUAUU | 5722 |
| 4701 | UAGCCCAC A GCUGAGAA | 1946 | UUCUCAGC CUGAUGAGGCCGUUAGGCCGAA IUGGGCUA | 5723 |
| 4704 | CCCACAGC U GAGAAUGU | 1947 | ACAUUCUC CUGAUGAGGCCGUUAGGCCGAA ICUGUGGG | 5724 |
| 4720 | UGGAAUAC C UAAGGAUA | 1948 | UAUCCUUA CUGAUGAGGCCGUUAGGCCGAA IUAUUCCA | 5725 |
| 4721 | GGAAUACC U AAGGAUAA | 1949 | UUAUCCUU CUGAUGAGGCCGUUAGGCCGAA IGUAUUCC | 5726 |
| 4731 | AGGAUAAC A CCGCUUUU | 1950 | AAAAGCGG CUGAUGAGGCCGUUAGGCCGAA IUUAUCCU | 5727 |
| 4733 | GAUAACAC C GCUUUUGU | 1951 | ACAAAAGC CUGAUGAGGCCGUUAGGCCGAA IUGUUAUC | 5728 |
| 4736 | AACACCGC U UUUGUUCU | 1952 | AGAACAAA CUGAUGAGGCCGUUAGGCCGAA ICGGUGUU | 5729 |
| 4744 | UUUUGUUC U CGCAAAAA | 1953 | UUUUUGCG CUGAUGAGGCCGUUAGGCCGAA IAACAAAA | 5730 |
| 4748 | GUUCUCGC A AAAACGUA | 1954 | UACGUUUU CUGAUGAGGCCGUUAGGCCGAA ICGAGAAC | 5731 |
| 4759 | AACGUAUC U CCUAAUUU | 1955 | AAAUUAGG CUGAUGAGGCCGUUAGGCCGAA IAUACGUU | 5732 |
| 4761 | CGUAUCUC C UAAUUUGA | 1956 | UCAAAUUA CUGAUGAGGCCGUUAGGCCGAA IAGAUACG | 5733 |
| 4762 | GUAUCUCC U AAUUUGAG | 1957 | CUCAAAUU CUGAUGAGGCCGUUAGGCCGAA IGAGAUAC | 5734 |
| 4773 | UUUGAGGC U CAGAUGAA | 1958 | UUCAUCUG CUGAUGAGGCCGUUAGGCCGAA ICCUCAAA | 5735 |
| 4775 | UGAGGCUC A GAUGAAAU | 1959 | AUUUCAUC CUGAUGAGGCCGUUAGGCCGAA IAGCCUCA | 5736 |
| 4786 | UGAAAUGC A UCAGGUCC | 1960 | GGACCUGA CUGAUGAGGCCGUUAGGCCGAA ICAUUUCA | 5737 |
| 4789 | AAUGCAUC A GGUCCUUU | 1961 | AAAGGACC CUGAUGAGGCCGUUAGGCCGAA IAUGCAUU | 5738 |
| 4794 | AUCAGGUC C UUUGGGGC | 1962 | GCCCCAAA CUGAUGAGGCCGUUAGGCCGAA IACCUGAU | 5739 |
| 4795 | UCAGGUCC U UUGGGGCA | 1963 | UGCCCCAA CUGAUGAGGCCGUUAGGCCGAA IGACCUGA | 5740 |
| 4803 | UUUGGGGC A UAGAUCAG | 1964 | CUGAUCUA CUGAUGAGGCCGUUAGGCCGAA ICCCCAAA | 5741 |
| 4810 | CAUAGAUC A GAAGACUA | 1965 | UAGUCUUC CUGAUGAGGCCGUUAGGCCGAA IAUCUAUG | 5742 |
| 4817 | CAGAAGAC U ACAAAAAU | 1966 | AUUUUUGU CUGAUGAGGCCGUUAGGCCGAA IUCUUCUG | 5743 |
| 4820 | AAGACUAC A AAAAUGAA | 1967 | UUCAUUUU CUGAUGAGGCCGUUAGGCCGAA IUAGUCUU | 5744 |
| 4831 | AAUGAAGC U GCUCUGAA | 1968 | UUCAGAGC CUGAUGAGGCCGUUAGGCCGAA ICUUCAUU | 5745 |
| 4834 | GAAGCUGC U CUGAAAUC | 1969 | GAUUUCAG CUGAUGAGGCCGUUAGGCCGAA ICAGCUUC | 5746 |
| 4836 | AGCUGCUC U GAAAUCUC | 1970 | GAGAUUUC CUGAUGAGGCCGUUAGGCCGAA IAGCAGCU | 5747 |
| 4843 | CUGAAAUC U CCUUUAGC | 1971 | GCUAAAGG CUGAUGAGGCCGUUAGGCCGAA IAUUUCAG | 5748 |
| 4845 | GAADUCUC C UUUAGCCA | 1972 | UGGCUAAA CUGAUGAGGCCGUUAGGCCGAA IAGAUUUC | 5749 |
| 4846 | AAAUCUCC U UUAGCCAU | 1973 | AUGGCUAA CUGAUGAGGCCGUUAGGCCGAA IGAGAUUU | 5750 |
| 4852 | CCUUUAGC C AUCACCCC | 1974 | GGGGUGAU CUGAUGAGGCCGUUAGGCCGAA ICUAAAGG | 5751 |
| 4853 | CUUUAGCC A UCACCCCA | 1975 | UGGGGUGA CUGAUGAGGCCGUUAGGCCGAA IGCUAAAG | 5752 |
| 4856 | UAGCCAUC A CCCCAACC | 1976 | GGUUGGGG CUGAUGAGGCCGUUAGGCCGAA IAUGGCUA | 5753 |
| 4858 | GCCAUCAC C CCAACCCC | 1977 | GGGGUUGG CUGAUGAGGCCGUUAGGCCGAA IUGAUGGC | 5754 |
| 4859 | CCAUCACC C CAACCCCC | 1978 | GGGGGUUG CUGAUGAGGCCGUUAGGCCGAA IGUGAUGG | 5755 |
| 4860 | CAUCACCC C AACCCCCC | 1979 | GGGGGGUU CUGAUGAGGCCGUUAGGCCGAA IGGUGAUG | 5756 |
| 4861 | AUCACCCC A ACCCCCCA | 1980 | UGGGGGGU CUGAUGAGGCCGUUAGGCCGAA IGGGUGAU | 5757 |
| 4864 | ACCCCAAC C CCCCAAAA | 1981 | UUUUGGGG CUGAUGAGGCCGUUAGGCCGAA IUUGGGGU | 5758 |
| 4865 | CCCCAACC C CCCAAAAU | 1982 | AUUUUGGG CUGAUGAGGCCGUUAGGCCGAA IGUUGGGG | 5759 |
| 4866 | CCCAACCC C CCAAAAUU | 1983 | AAUUUUGG CUGAUGAGGCCGUUAGGCCGAA IGGUUGGG | 5760 |
| 4867 | CCAACCCC C CAAAAUUA | 1984 | UAAUUUUG CUGAUGAGGCCGUUAGGCCGAA IGGGUUGG | 5761 |
| 4868 | CAACCCCC C AAAAUUAG | 1985 | CUAAUUUU CUGAUGAGGCCGUUAGGCCGAA IGGGGUUG | 5762 |
| 4869 | AACCCCCC A AAAUUAGU | 1986 | ACUAAUUU CUGAUGAGGCCGUUAGGCCGAA IGGGGGUU | 5763 |
| 4887 | UGUGUUAC U UAUGGAAG | 1987 | CUUCCAUA CUGAUGAGGCCGUUAGGCCGAA IUAACACA | 5764 |
| 4905 | UAGUUUUC U CCUUUUAC | 1988 | GUAAAAGG CUGAUGAGGCCGUUAGGCCGAA IAAAACUA | 5765 |
| 4907 | GUUUUCUC C UUUUACUU | 1989 | AAGUAAAA CUGAUGAGGCCGUUAGGCCGAA IAGAAAAC | 5766 |
| 4908 | UUUUCUCC U UUUACUUC | 1990 | GAAGUAAA CUGAUGAGGCCGUUAGGCCGAA IGAGAAAA | 5767 |
| 4914 | CCUUUUAC U UCACUUCA | 1991 | UGAAGUGA CUGAUGAGGCCGUUAGGCCGAA IUAAAAGG | 5768 |
| 4917 | UUUACUUC A CUUCAAAA | 1992 | UUUUGAAG CUGAUGAGGCCGUUAGGCCGAA IAAGUAAA | 5769 |
| 4919 | UACUUCAC U UCAAAAGC | 1993 | GCUUUUGA CUGAUGAGGCCGUUAGGCCGAA IUGAAGUA | 5770 |
| 4922 | UUCACUUC A AAAGCUUU | 1994 | AAAGCUUU CUGAUGAGGCCGUUAGGCCGAA IAAGUGAA | 5771 |
| 4928 | UCAAAAGC U UUUUACUC | 1995 | GAGUAAAA CUGAUGAGGCCGUUAGGCCGAA ICUUUUGA | 5772 |
| 4935 | CUUUUUAC U CAAAGAGU | 1996 | ACUCUUUG CUGAUGAGGCCGUUAGGCCGAA IUAAAAAG | 5773 |
| 4937 | UUUUACUC A AAGAGUAU | 1997 | AUACUCUU CUGAUGAGGCCGUUAGGCCGAA IAGUAAAA | 5774 |
| 4952 | AUAUGUUC C CUCCAGGU | 1998 | ACCUGGAG CUGAUGAGGCCGUUAGGCCGAA IAACAUAU | 5775 |
| 4953 | UAUGUUCC C UCCAGGUC | 1999 | GACCUGGA CUGAUGAGGCCGUUAGGCCGAA IGAACAUA | 5776 |
| 4954 | AUGUUCCC U CCAGGUCA | 2000 | UGACCUGG CUGAUGAGGCCGUUAGGCCGAA IGGAACAU | 5777 |
| 4956 | GUUCCCUC C AGGUCAGC | 2001 | GCUGACCU CUGAUGAGGCCGUUAGGCCGAA IAGGGAAC | 5778 |
| 4957 | UUCCCUCC A GGUCAGCU | 2002 | AGCUGACC CUGAUGAGGCCGUUAGGCCGAA IGAGGGAA | 5779 |
| 4962 | UCCAGGUC A GCUGCCCC | 2003 | GGGGCAGC CUGAUGAGGCCGUUAGGCCGAA IACCUGGA | 5780 |
| 4965 | AGGUCAGC U GCCCCCAA | 2004 | UUGGGGGC CUGAUGAGGCCGUUAGGCCGAA ICUGACCU | 5781 |
| 4968 | UCAGCUGC C CCCAAACC | 2005 | GGUUUGGG CUGAUGAGGCCGUUAGGCCGAA ICAGCUGA | 5782 |
| 4969 | CAGCUGCC C CCAAACCC | 2006 | GGGUUUGG CUGAUGAGGCCGUUAGGCCGAA IGCAGCUG | 5783 |
| 4970 | AGCUGCCC C CAAACCCC | 2007 | GGGGUUUG CUGAUGAGGCCGUUAGGCCGAA IGGCAGCU | 5784 |
| 4971 | GCUGCCCC C AAACCCCC | 2008 | GGGGGUUU CUGAUGAGGCCGUUAGGCCGAA IGGGCAGC | 5785 |
| 4972 | CUGCCCCC A AACCCCCU | 2009 | AGGGGGUU CUGAUGAGGCCGUUAGGCCGAA IGGGGCAG | 5786 |
| 4976 | CCCCAAAC C CCCUCCUU | 2010 | AAGGAGGG CUGAUGAGGCCGUUAGGCCGAA IUUUGGGG | 5787 |
| 4977 | CCCAAACC C CCUCCUUA | 2011 | UAAGGAGG CUGAUGAGGCCGUUAGGCCGAA IGUUUGGG | 5788 |
| 4978 | CCAAACCC C CUCCUUAC | 2012 | GUAAGGAG CUGAUGAGGCCGUUAGGCCGAA IGGUUUGG | 5789 |
| 4979 | CAAACCCC C UCCUUACG | 2013 | CGUAAGGA CUGAUGAGGCCGUUAGGCCGAA IGGGUUUG | 5790 |
| 4980 | AAACCCCC U CCUUACGC | 2014 | GCGUAAGG CUGAUGAGGCCGUUAGGCCGAA IGGGGUUU | 5791 |
| 4982 | ACCCCCUC C UUACGCUU | 2015 | AAGCGUAA CUGAUGAGGCCGUUAGGCCGAA IAGGGGGU | 5792 |
| 4983 | CCCCCUCC U UACGCUUU | 2016 | AAAGCGUA CUGAUGAGGCCGUUAGGCCGAA IGAGGGGG | 5793 |
| 4989 | CCUUACGC U UUGUCACA | 2017 | UGUGACAA CUGAUGAGGCCGUUAGGCCGAA ICGUAAGG | 5794 |
| 4995 | GCUUUGUC A CACAAAAA | 2018 | UUUUUGUG CUGAUGAGGCCGUUAGGCCGAA IACAAAGC | 5795 |
| 4997 | UUUGUCAC A CAAAAAGU | 2019 | ACUUUUUG CUGAUGAGGCCGUUAGGCCGAA IUGACAAA | 5796 |
| 4999 | UGUCACAC A AAAAGUGU | 2020 | ACACUUUU CUGAUGAGGCCGUUAGGCCGAA IUGUGACA | 5797 |
| 5009 | AAAGUGUC U CUGCCUUG | 2021 | CAAGGCAG CUGAUGAGGCCGUUAGGCCGAA IACACUUU | 5798 |
| 5011 | AGUGUCUC U GCCUUGAG | 2022 | CUCAAGGC CUGAUGAGGCCGUUAGGCCGAA IAGACACU | 5799 |
| 5014 | GUCUCUGC C UUGAGUCA | 2023 | UGACUCAA CUGAUGAGGCCGUUAGGCCGAA ICAGAGAC | 5800 |
| 5015 | UCUCUGCC U UGAGUCAU | 2024 | AUGACUCA CUGAUGAGGCCGUUAGGCCGAA IGCAGAGA | 5801 |
| 5022 | CUUGAGUC A UCUAUUCA | 2025 | UGAAUAGA CUGAUGAGGCCGUUAGGCCGAA IACUCAAG | 5802 |
| 5025 | GAGUCAUC U AUUCAAGC | 2026 | GCUUGAAU CUGAUGAGGCCGUUAGGCCGAA IAUGACUC | 5803 |
| 5030 | AUCUAUUC A AGCACUUA | 2027 | UAAGUGCU CUGAUGAGGCCGUUAGGCCGAA IAAUAGAU | 5804 |
| 5034 | AUUCAAGC A CUUACAGC | 2028 | GCUGUAAG CUGAUGAGGCCGUUAGGCCGAA ICUUGAAU | 5805 |
| 5036 | UCAAGCAC U UACAGCUC | 2029 | GAGCUGUA CUGAUGAGGCCGUUAGGCCGAA IUGCUUGA | 5806 |
| 5040 | GCACUUAC A GCUCUGGC | 2030 | GCCAGAGC CUGAUGAGGCCGUUAGGCCGAA IUAAGUGC | 5807 |
| 5043 | CUUACAGC U CUGGCCAC | 2031 | GUGGCCAG CUGAUGAGGCCGUUAGGCCGAA ICUGUAAG | 5808 |
| 5045 | UACAGCUC U GGCCACAA | 2032 | UUGUGGCC CUGAUGAGGCCGUUAGGCCGAA IAGCUGUA | 5809 |
| 5049 | GCUCUGGC C ACAACAGG | 2033 | CCUGUUGU CUGAUGAGGCCGUUAGGCCGAA ICCAGAGC | 5810 |
| 5050 | CUCUGGCC A CAACAGGG | 2034 | CCCUGUUG CUGAUGAGGCCGUUAGGCCGAA IGCCAGAG | 5811 |
| 5052 | CUGGCCAC A ACAGGGCA | 2035 | UGCCCUGU CUGAUGAGGCCGUUAGGCCGAA IUGGCCAG | 5812 |
| 5055 | GCCACAAC A GGGCAUUU | 2036 | AAAUGCCC CUGAUGAGGCCGUUAGGCCGAA IUUGUGGC | 5813 |
| 5060 | AACAGGGC A UUUUACAG | 2037 | CUGUAAAA CUGAUGAGGCCGUUAGGCCGAA ICCCUGUU | 5814 |
| 5067 | CAUUUUAC A GGUGCGAA | 2038 | UUCGCACC CUGAUGAGGCCGUUAGGCCGAA IUAAAAUG | 5815 |
| 5080 | CGAAUGAC A GUAGCAUU | 2039 | AAUGCUAC CUGAUGAGGCCGUUAGGCCGAA IUCAUUCG | 5816 |
| 5086 | ACAGUAGC A UUAUGAGU | 2040 | ACUCAUAA CUGAUGAGGCCGUUAGGCCGAA ICUACUGU | 5817 |
| 5106 | GUGAAUUC A GGUAGUAA | 2041 | UUACUACC CUGAUGAGGCCGUUAGGCCGAA IAAUUCAC | 5818 |
| 5124 | UAUGAAAC U AGGGUUUG | 2042 | CAAACCCU CUGAUGAGGCCGUUAGGCCGAA IUUUCAUA | 5819 |
| 5146 | GAUAAUGC U UUCACAAC | 2043 | GUUGUGAA CUGAUGAGGCCGUUAGGCCGAA ICAUUAUC | 5820 |
| 5150 | AUGCUUUC A CAACAUUU | 2044 | AAAUGUUG CUGAUGAGGCCGUUAGGCCGAA IAAAGCAU | 5821 |
| 5152 | GCUUUCAC A ACAUUUGC | 2045 | GCAAAUGU CUGAUGAGGCCGUUAGGCCGAA IUGAAAGC | 5822 |
| 5155 | UUCACAAC A UUUGCAGA | 2046 | UCUGCAAA CUGAUGAGGCCGUUAGGCCGAA IUUGUGAA | 5823 |
| 5161 | ACAUUUGC A GAUGUUUU | 2047 | AAAACAUC CUGAUGAGGCCGUUAGGCCGAA ICAAAUGU | 5824 |
| 5186 | AAAAGUUC C UUCCUAAA | 2048 | UUUAGGAA CUGAUGAGGCCGUUAGGCCGAA IAACUUUU | 5825 |
| 5187 | AAAGUUCC U UCCUAAAA | 2049 | UUUUAGGA CUGAUGAGGCCGUUAGGCCGAA IGAACUUU | 5826 |
| 5190 | GUUCCUUC C UAAAAUAA | 2050 | UUAUUUUA CUGAUGAGGCCGUUAGGCCGAA IAAGGAAC | 5827 |
| 5191 | UUCCUUCC U AAAAUAAU | 2051 | AUUAUUUU CUGAUGAGGCCGUUAGGCCGAA IGAAGGAA | 5828 |
| 5203 | AUAAUUUC U CUACAAUU | 2052 | AAUUGUAG CUGAUGAGGCCGUUAGGCCGAA IAAAUUAU | 5829 |
| 5205 | AAUUUCUC U ACAAUUGG | 2053 | CCAAUUGU CUGAUGAGGCCGUUAGGCCGAA IAGAAAUU | 5830 |
| 5208 | UUCUCUAC A AUUGGAAG | 2054 | CUUCCAAU CUGAUGAGGCCGUUAGGCCGAA IUAGAGAA | 5831 |
| 5229 | GAAGAUUC A GCUAGUUA | 2055 | UAACUAGC CUGAUGAGGCCGUUAGGCCGAA IAAUCUUC | 5832 |
| 5232 | GAUUCAGC U AGUUAGGA | 2056 | UCCUAACU CUGAUGAGGCCGUUAGGCCGAA ICUGAAUC | 5833 |
| 5243 | UUAGGAGC C CAUUUUUU | 2057 | AAAAAAUG CUGAUGAGGCCGUUAGGCCGAA ICUCCUAA | 5834 |
| 5244 | UAGGAGCC C AUUUUUUC | 2058 | GAAAAAAU CUGAUGAGGCCGUUAGGCCGAA IGCUCCUA | 5835 |
| 5245 | AGGAGCCC A UUUUUUCC | 2059 | GGAAAAAA CUGAUGAGGCCGUUAGGCCGAA IGGCUCCU | 5836 |
| 5253 | AUUUUUUC C UAAUCUGU | 2060 | ACAGAUUA CUGAUGAGGCCGUUAGGCCGAA IAAAAAAU | 5837 |
| 5254 | UUUUUUCC U AAUCUGUG | 2061 | CACAGAUU CUGAUGAGGCCGUUAGGCCGAA IGAAAAAA | 5838 |
| 5259 | UCCUAAUC U GUGUGUGC | 2062 | GCACACAC CUGAUGAGGCCGUUAGGCCGAA IAUUAGGA | 5839 |
| 5268 | GUGUGUGC C CUGUAACC | 2063 | GGUUACAG CUGAUGAGGCCGUUAGGCCGAA ICACACAC | 5840 |
| 5269 | UGUGUGCC C UGUAACCU | 2064 | AGGUUACA CUGAUGAGGCCGUUAGGCCGAA IGCACACA | 5841 |
| 5270 | GUGUGCCC U GUAACCUG | 2065 | CAGGUUAC CUGAUGAGGCCGUUAGGCCGAA IGGCACAC | 5842 |
| 5276 | CCUGUAAC C UGACUGGU | 2066 | ACCAGUCA CUGAUGAGGCCGUUAGGCCGAA IUUACAGG | 5843 |
| 5277 | CUGUAACC U GACUGGUU | 2067 | AACCAGUC CUGAUGAGGCCGUUAGGCCGAA IGUUACAG | 5844 |
| 5281 | AACCUGAC U GGUUAACA | 2068 | UGUUAACC CUGAUGAGGCCGUUAGGCCGAA IUCAGGUU | 5845 |
| 5289 | UGGUUAAC A GCAGUCCU | 2069 | AGGACUGC CUGAUGAGGCCGUUAGGCCGAA IUUAACCA | 5846 |
| 5292 | UUAACAGC A GUCCUUUG | 2070 | CAAAGGAC CUGAUGAGGCCGUUAGGCCGAA ICUGUUAA | 5847 |
| 5296 | CAGCAGUC C UUUGUAAA | 2071 | UUUACAAA CUGAUGAGGCCGUUAGGCCGAA IACUGCUG | 5848 |
| 5297 | AGCAGUCC U UUGUAAAC | 2072 | GUUUACAA CUGAUGAGGCCGUUAGGCCGAA IGACUGCU | 5849 |
| 5306 | UUGUAAAC A GUGUUUUA | 2073 | UAAAACAC CUGAUGAGGCCGUUAGGCCGAA IUUUACAA | 5850 |
| 5318 | UUUUAAAC U CUCCUAGU | 2074 | ACUAGGAG CUGAUGAGGCCGUUAGGCCGAA IUUUAAAA | 5851 |
| 5320 | UUAAACUC U CCUAGUCA | 2075 | UGACUAGG CUGAUGAGGCCGUUAGGCCGAA IAGUUUAA | 5852 |
| 5322 | AAACUCUC C UAGUCAAU | 2076 | AUUGACUA CUGAUGAGGCCGUUAGGCCGAA IAGAGUUU | 5853 |
| 5323 | AACUCUCC U AGUCAAUA | 2077 | UAUUGACU CUGAUGAGGCCGUUAGGCCGAA IGAGAGUU | 5854 |
| 5328 | UCCUAGUC A AUAUCCAC | 2078 | GUGGAUAU CUGAUGAGGCCGUUAGGCCGAA IACUAGGA | 5855 |
| 5334 | UCAAUAUC C ACCCCAUC | 2079 | GAUGGGGU CUGAUGAGGCCGUUAGGCCGAA IAUAUUGA | 5856 |
| 5335 | CAAUAUCC A CCCCAUCC | 2080 | GGAUGGGG CUGAUGAGGCCGUUAGGCCGAA IGAUAUUG | 5857 |
| 5337 | AUAUCCAC C CCAUCCAA | 2081 | UUGGAUGG CUGAUGAGGCCGUUAGGCCGAA IUGGAUAU | 5858 |
| 5338 | UAUCCACC C CAUCCAAU | 2082 | AUUGGAUG CUGAUGAGGCCGUUAGGCCGAA IGUGGAUA | 5859 |
| 5339 | AUCCACCC C AUCCAAUU | 2083 | AAUUGGAU CUGAUGAGGCCGUUAGGCCGAA IGGUGGAU | 5860 |
| 5340 | UCCACCCC A UCCAAUUU | 2084 | AAAUUGGA CUGAUGAGGCCGUUAGGCCGAA IGGGUGGA | 5861 |
| 5343 | ACCCCAUC C AAUUUAUC | 2085 | GAUAAAUU CUGAUGAGGCCGUUAGGCCGAA IAUGGGGU | 5862 |
| 5344 | CCCCAUCC A AUUUAUCA | 2086 | UGAUAAAU CUGAUGAGGCCGUUAGGCCGAA IGAUGGGG | 5863 |
| 5352 | AAUUUAUC A AGGAAGAA | 2087 | UUCUUCCU CUGAUGAGGCCGUUAGGCCGAA IAUAAAUU | 5864 |
| 5368 | AAUGGUUC A GAAAAUAU | 2088 | AUAUUUUC CUGAUGAGGCCGUUAGGCCGAA IAACCAUU | 5865 |
| 5381 | AUAUUUUC A GCCUACAG | 2089 | CUGUAGGC CUGAUGAGGCCGUUAGGCCGAA IAAAAUAU | 5866 |
| 5384 | UUUUCAGC C UACAGUUA | 2090 | UAACUGUA CUGAUGAGGCCGUUAGGCCGAA ICUGAAAA | 5867 |
| 5385 | UUUCAGCC U ACAGUUAU | 2091 | AUAACUGU CUGAUGAGGCCGUUAGGCCGAA IGCUGAAA | 5868 |
| 5388 | CAGCCUAC A GUUAUGUU | 2092 | AACAUAAC CUGAUGAGGCCGUUAGGCCGAA IUAGGCUG | 5869 |
| 5398 | UUAUGUUC A GUCACACA | 2093 | UGUGUGAC CUGAUGAGGCCGUUAGGCCGAA IAACAUAA | 5870 |
| 5402 | GUUCAGUC A CACACACA | 2094 | UGUGUGUG CUGAUGAGGCCGUUAGGCCGAA IACUGAAC | 5871 |
| 5404 | UCAGUCAC A CACACAUA | 2095 | UAUGUGUG CUGAUGAGGCCGUUAGGCCGAA IUGACUGA | 5872 |
| 5406 | AGUCACAC A CACAUACA | 2096 | UGUAUGUG CUGAUGAGGCCGUUAGGCCGAA IUGUGACU | 5873 |
| 5408 | UCACACAC A CAUACAAA | 2097 | UUUGUAUG CUGAUGAGGCCGUUAGGCCGAA IUGUGUGA | 5874 |
| 5410 | ACACACAC A UACAAAAU | 2098 | AUUUUGUA CUGAUGAGGCCGUUAGGCCGAA IUGUGUGU | 5875 |
| 5414 | ACACAUAC A AAAUGUUC | 2099 | GAACAUUU CUGAUGAGGCCGUUAGGCCGAA IUAUGUGU | 5876 |
| 5423 | AAAUGUUC C UUUUGCUU | 2100 | AAGCAAAA CUGAUGAGGCCGUUAGGCCGAA IAACAUUU | 5877 |
| 5424 | AAUGUUCC U UUUGCUUU | 2101 | AAAGCAAA CUGAUGAGGCCGUUAGGCCGAA IGAACAUU | 5878 |
| 5430 | CCUUUUGC U UUUAAAGU | 2102 | ACUUUAAA CUGAUGAGGCCGUUAGGCCGAA ICAAAAGG | 5879 |
| 5449 | UUUUUGAC U CCCAGAUC | 2103 | GAUCUGGG CUGAUGAGGCCGUUAGGCCGAA IUCAAAAA | 5880 |
| 5451 | UUUGACUC C CAGAUCAG | 2104 | CUGAUCUG CUGAUGAGGCCGUUAGGCCGAA IAGUCAAA | 5881 |
| 5452 | UUGACUCC C AGAUCAGU | 2105 | ACUGAUCU CUGAUGAGGCCGUUAGGCCGAA IGAGUCAA | 5882 |
| 5453 | UGACUCCC A GAUCAGUC | 2106 | GACUGAUC CUGAUGAGGCCGUUAGGCCGAA IGGAGUCA | 5883 |
| 5458 | CCCAGAUC A GUCAGAGC | 2107 | GCUCUGAC CUGAUGAGGCCGUUAGGCCGAA IAUCUGGG | 5884 |
| 5462 | GAUCAGUC A GAGCCCCU | 2108 | AGGGGCUC CUGAUGAGGCCGUUAGGCCGAA IACUGAUC | 5885 |
| 5467 | GUCAGAGC C CCUACAGC | 2109 | GCUGUAGG CUGAUGAGGCCGUUAGGCCGAA ICUCUGAC | 5886 |
| 5468 | UCAGAGCC C CUACAGCA | 2110 | UGCUGUAG CUGAUGAGGCCGUUAGGCCGAA IGCUCUGA | 5887 |
| 5469 | CAGAGCCC C UACAGCAU | 2111 | AUGCUGUA CUGAUGAGGCCGUUAGGCCGAA IGGCUCUG | 5888 |
| 5470 | AGAGCCCC U ACAGCAUU | 2112 | AAUGCUGU CUGAUGAGGCCGUUAGGCCGAA IGGGCUCU | 5889 |
| 5473 | GCCCCUAC A GCAUUGUU | 2113 | AACAAUGC CUGAUGAGGCCGUUAGGCCGAA IUAGGGGC | 5890 |
| 5476 | CCUACAGC A UUGUUAAG | 2114 | CUUAACAA CUGAUGAGGCCGUUAGGCCGAA ICUGUAGG | 5891 |
| 5504 | UUUUUGUC U CAAUGAAA | 2115 | UUUCAUUG CUGAUGAGGCCGUUAGGCCGAA IACAAAAA | 5892 |
| 5506 | UUUGUCUC A AUGAAAAU | 2116 | AUUUUCAU CUGAUGAGGCCGUUAGGCCGAA IAGACAAA | 5893 |
| 5520 | AAUAAAAC U AUAUUCAU | 2117 | AUGAAUAU CUGAUGAGGCCGUUAGGCCGAA IUUUUAUU | 5894 |

Input Sequence = NM_005228.1.
Cut Site = CH/.
Arm Length = 8.
Core Sequence = CUGAUGAG GCCGUUAGGC CGAA NM_005228.1 (Homo sapiens epidermal growth factor receptor (avian erythroblastic leukemia viral (v-erb-b) oncogene homolog) (EGFR), mRNA)

[0222] Underlined region can be any X sequence or linker, as described herein. I=Inosine

TABLE V
Human EGFR Receptor Zinzyme and Substrate Sequence

| | | | | |
|---|---|---|---|---|
| Pos | Substrate | Seq ID | Zinzyme | Seq ID |

| | | | | |
|---|---|---|---|---|
| 9 | GCCGCGCU G CGCCGGAG | 2118 | CUCCGGCG GCCGAAAGGCGAGUGAGGUCU AGCGCGGC | 5895 |
| 11 | CGCGCUGC G CCGGAGUC | 2119 | GACUCCGG GCCGAAAGGCGAGUGAGGUCU GCAGCGCG | 5896 |
| 17 | GCGCCGGA G UCCCGAGC | 2120 | GCUCGGGA GCCGAAAGGCGAGUGAGGUCU UCCGGCGC | 5897 |
| 24 | AGUCCCGA G CUAGCCCC | 2121 | GGGGCUAG GCCGAAAGGCGAGUGAGGUCU UCGGGACU | 5898 |
| 28 | CCGAGCUA G CCCCGGCG | 2122 | CGCCGGGG GCCGAAAGGCGAGUGAGGUCU UAGCUCGG | 5899 |
| 34 | UAGCCCCG G CGCCGCCG | 2123 | CGGCGGCG GCCGAAAGGCGAGUGAGGUCU CGGGGCUA | 5900 |
| 36 | GCCCCGGC G CCGCCGCC | 2124 | GGCGGCGG GCCGAAAGGCGAGUGAGGUCU GCCGGGGC | 5901 |
| 39 | CCGGCGCC G CCGCCGCC | 2125 | GGCGGCGG GCCGAAAGGCGAGUGAGGUCU GGCGCCGG | 5902 |
| 42 | GCGCCGCC G CCGCCCAG | 2126 | CUGGGCGG GCCGAAAGGCGAGUGAGGUCU GGCGGCGC | 5903 |
| 45 | CCGCCGCC G CCCAGACC | 2127 | GGUCUGGG GCCGAAAGGCGAGUGAGGUCU GGCGGCGG | 5904 |
| 63 | GACGACAG G CCACCUCG | 2128 | CGAGGUGG GCCGAAAGGCGAGUGAGGUCU CUGUCGUC | 5905 |
| 71 | GCCACCUC G UCGCCCUC | 2129 | GACCCCGA CCCGAAAGGCGAGUGAGGUCU CAGGUCGC | 5906 |
| 75 | CCUCGUCG G CGUCCGCC | 2130 | GGCGGACG GCCGAAAGGCGAGUGAGGUCU CGACGAGG | 5907 |
| 77 | UCGUCGGC G UCCGCCCG | 2131 | CGGGCGGA GCCGAAAGGCGAGUGAGGUCU GCCGACGA | 5908 |
| 81 | CGGCGUCC G CCCGAGUC | 2132 | GACUCGGG GCCGAAAGGCCAGUGAGGUCU GGACGCCG | 5909 |
| 87 | CCGCCCCA G UCCCCCCC | 2133 | GGCGCGGA GCCGAAAGGCGAGUGAGGUCU UCGGGCGG | 5910 |
| 93 | GAGUCCCC G CCUCGCCG | 2134 | CGGCGAGG GCCCAAAGGCGAGUGAGGUCU GCGGACUC | 5911 |
| 98 | CCCGCCUC G CCGCCAAC | 2135 | CUUGGCGC GCCGAAAGGCGAGUGAGGUCU GAGGCGGG | 5912 |
| 101 | GCCUCGCC G CCAACGCC | 2136 | CGCGUUGG CCCGAAAGGCGAGUGAGGUCU GGCGAGGC | 5913 |
| 107 | CCGCCAAC G CCACAACC | 2137 | GGUUGUGG GCCGAAAGGCGAGUGAGGUCU GUUGGCGG | 5914 |
| 119 | CAACCACC G CGCACGGC | 2138 | GCCGUGCG CCCGAAACGCCACUGACGUCU GGUGGUUG | 5915 |
| 121 | ACCACCGC G CACGGCCC | 2139 | GCGCCGUC GCCGAAAGGCCAGUCAGGUCU GCGCUCCU | 5916 |
| 126 | CCCCCACG G CCCCCUGA | 2140 | UCAGGCGC CCCGAAAGGCGAGUGAGGUCU CGUGCCCC | 5917 |
| 139 | CUGACUCC G UCCAGUAU | 2141 | AUACUGGA GCCGAAAGGCGAGUGAGGUCU GGAGUCAG | 5918 |
| 144 | UCCGUCCA G UAUUGAUC | 2142 | GAUCAAUA GCCGAAAGGCGACUCAGGUCU UCGACGGA | 5919 |
| 159 | UCGGGAGA G CCGGAGCG | 2143 | CGCUCCGG GCCGAAAGGCGAGUGAGGUCU UCUCCCGA | 5920 |
| 165 | GAGCCCCA G CGAGCUCU | 2144 | AGAGCUCG GCCGAAAGGCGAGUGAGGUCU UCCGGCUC | 5921 |
| 169 | CCGACCGA G CUCUUCGG | 2145 | CCGAACAG GCCGAAAGGCCACUCACCUCU UCCCUCCG | 5922 |
| 181 | UUCGGGGA G CAGCCAUG | 2146 | CAUCGCUG CCCGAAACGCGACUGAGCUCU UCCCCGAA | 5923 |
| 184 | CGCCAGCA G CGAUCCCA | 2147 | UCCCAUCG GCCGAAACGCGAGUGAGCUCU UCCUCCCC | 5924 |
| 189 | GCACCCAU G CGACCCUC | 2148 | CACCGUCC CCCCAAAGGCGAGUCACCUCU AUCGCUGC | 5925 |
| 205 | CCCCCACC G CCGGGCCA | 2149 | UGCCCCGG GCCCAAACGCGAGUGACCUCU CGUCCCCG | 5926 |
| 211 | CCGCCCGC G CAGCCCUC | 2150 | GAGCGCUG GCCCAAAGGCCAGUGAGGUCU CCCGGCCG | 5927 |
| 214 | CCCGGGCA G CGCUCCUG | 2151 | CAGGAGCG GCCCAAACGCCAGUGAGGUCU UCCCCCGG | 5928 |
| 216 | GGGCCAGC G CUCCUCGC | 2152 | GCCAGGAC GCCGAAACCCGAGUGAGCUCU GCUGCCCC | 5929 |
| 223 | CGCUCCUG G CGCUGCUC | 2153 | CACCACCG GCCCAAACGCCAGUCACCUCU CACCAGCC | 5930 |
| 225 | CUCCUCCC G CUCCUCCC | 2154 | CCCACCAC CCCCAAACCCCACUCACCUCU CCCACCAC | 5931 |
| 228 | CUGGCCCU G CUGGCUCC | 2155 | CCAGCCAC CCCGAAACGCGAGUCAGGUCU AGCGCCAC | 5932 |
| 232 | CCCUCCUC G CUCCCCUC | 2156 | CACCGCAC CCCCAAACCCCACUCACCUCU CACCACCC | 5933 |
| 235 | UCCUCCCU G CGCUCUCC | 2157 | CCACACCC CCCCAAACGCGAGUGACCUCU ACCCACCA | 5934 |
| 237 | CUCCCUCC G CUCUCCCC | 2158 | CCCCACAC CCCCAAACCCCACUCAGCUCU GCACCCAC | 5935 |
| 242 | UGCGCUCU G CCCCCCCA | 2159 | UCCCCCCC CCCCAAACCCCACUCACGUCU ACACCCCA | 5936 |
| 247 | UCUCCCCC G CCACUCCC | 2160 | CCCACUCC CCCCAAACCCCACUCACCUCU CCCCCACA | 5937 |
| 251 | CCCGGCCA G UCCCCCUC | 2161 | CAGCCCCA CCCCAAACCCCAGUCAGCUCU UCGCCCGC | 5938 |
| 256 | CGAGUCGC G CUCUCCAC | 2162 | CUCCACAC CCCCAAACCCCACUCACCUCU CCCACUCC | 5939 |
| 274 | AAAAGAAA G UUUCCCAA | 2163 | UUGGCAAA CCCCAAACCCCACUCACCUCU UUUCUUUU | 5940 |
| 278 | CAAACUUU G CCAACCCA | 2164 | UGCCUUGG CCCCAAACCCCACUCACCUCU AAACUUUC | 5941 |
| 284 | UUCCCAAC G CACCACUA | 2165 | UACUCCUC CCCCAAAGCCCACUCACCUCU CUUGGCAA | 5942 |
| 290 | AGGCACGA G UAACAAGC | 2166 | GCUUGUUA GCCGAAAGGCGAGUGAGGUCU UCGUGCCU | 5943 |
| 297 | AGUAACAA G CUCACGCA | 2167 | UGCGUGAG GCCGAAAGGCGAGUGAGGUCU UUGUUACU | 5944 |
| 303 | AAGCUCAC G CAGUUGGG | 2168 | CCCAACUG GCCGAAAGGCGAGUGAGGUCU GUGAGCUU | 5945 |
| 306 | CUCACGCA G UUGGGCAC | 2169 | GUGCCCAA GCCGAAAGGCGAGUGAGGUCU UGCGUGAG | 5946 |
| 311 | GCAGUUGG G CACUUUUG | 2170 | CAAAAGUG GCCGAAAGGCGAGUGAGGUCU CCAACUGC | 5947 |
| 335 | UUUUCUCA G CCUCCAGA | 2171 | UCUGGAGG GCCGAAAGGCGAGUGAGGUCU UGAGAAAA | 5948 |
| 348 | CAGAGGAU G UUCAAUAA | 2172 | UUAUUGAA GCCGAAAGGCGAGUGAGGUCU AUCCUCUG | 5949 |
| 359 | CAAUAACU G UGAGGUGG | 2173 | CCACCUCA GCCGAAAGGCGAGUGAGGUCU AGUUAUUG | 5950 |
| 364 | ACUGUGAG G UGGUCCUU | 2174 | AAGGACCA GCCGAAAGGCGAGUGAGGUCU CUCACAGU | 5951 |
| 367 | GUGAGGUG G UCCUUGGG | 2175 | CCCAAGGA GCCGAAAGGCGAGUGAGGUCU CACCUCAC | 5952 |
| 394 | UUACCUAU G UGCAGAGG | 2176 | CCUCUGCA GCCGAAAGGCGAGUGAGGUCU AUAGGUAA | 5953 |
| 396 | ACCUAUGU G CAGAGGAA | 2177 | UUCCUCUG GCCGAAAGGCGAGUGAGGUCU ACAUAGGU | 5954 |
| 439 | UCCAGGAG G UGGCUGGU | 2178 | ACCAGCCA GCCGAAAGGCGAGUGAGGUCU CUCCUGGA | 5955 |
| 442 | AGGAGGUG G CUGGUUAU | 2179 | AUAACCAG GCCGAAAGGCGAGUGAGGUCU CACCUCCU | 5956 |
| 446 | GGUGGCUG G UUAUGUCC | 2180 | GGACAUAA GCCGAAAGGCGAGUGAGGUCU CAGCCACC | 5957 |
| 451 | CUGGUUAU G UCCUCAUU | 2181 | AAUGAGGA GCCGAAAGGCGAGUGAGGUCU AUAACCAG | 5958 |
| 460 | UCCUCAUU G CCCUCAAC | 2182 | GUUGAGGG GCCGAAAGGCGAGUGAGGUCU AAUGAGGA | 5959 |
| 472 | UCAACACA G UGGAGCGA | 2183 | UCGCUCCA GCCGAAAGGCGAGUGAGGUCU UGUGUUGA | 5960 |
| 477 | ACAGUGGA G CGAAUUCC | 2184 | GGAAUUCG GCCGAAAGGCGAGUGAGGUCU UCCACUGU | 5961 |
| 498 | GAAAACCU G CAGAUCAU | 2185 | AUGAUCUG GCCGAAAGGCGAGUGAGGUCU AGGUUUUC | 5962 |
| 519 | GGAAAUAU G UACUACGA | 2186 | UCGUAGUA GCCGAAAGGCGAGUGAGGUCU AUAUUUCC | 5963 |
| 538 | AUUCCUAU G CCUUAGCA | 2187 | UGCUAAGG GCCGAAAGGCGAGUGAGGUCU AUAGGAAU | 5964 |
| 544 | AUGCCUUA G CAGUCUUA | 2188 | UAAGACUG GCCGAAAGGCGAGUGAGGUCU UAAGGCAU | 5965 |
| 547 | CCUUAGCA G UCUUAUCU | 2189 | AGAUAAGA GCCGAAAGGCGAGUGAGGUCU UGCUAAGG | 5966 |
| 565 | ACUAUGAU G CAAAUAAA | 2190 | UUUAUUUG GCCGAAAGGCGAGUGAGGUCU AUCAUAGU | 5967 |
| 588 | CUGAAGGA G CUGCCCAU | 2191 | AUGGGCAG GCCGAAAGGCGAGUGAGGUCU UCCUUCAG | 5968 |
| 591 | AAGGAGCU G CCCAUGAG | 2192 | CUCAUGGG GCCGAAAGGCGAGUGAGGUCU AGCUCCUU | 5969 |
| 618 | GAAAUCCU G CAUGGCGC | 2193 | GCGCCAUG GCCGAAAGGCGAGUGAGGUCU AGGAUUUC | 5970 |
| 623 | CCUGCAUG G CGCCGUGC | 2194 | GCACGGCG GCCGAAAGGCGAGUGAGGUCU CAUGCAGG | 5971 |
| 625 | UGCAUGGC G CCGUGCGG | 2195 | CCGCACGG GCCGAAAGGCGAGUGAGGUCU GCCAUGCA | 5972 |
| 628 | AUGGCGCC G UGCGGUUC | 2196 | GAACCGCA GCCGAAAGGCGAGUGAGGUCU GGCGCCAU | 5973 |
| 630 | GGCGCCGU G CGGUUCAG | 2197 | CUGAACCG GCCGAAAGGCGAGUGAGGUCU ACGGCGCC | 5974 |
| 633 | GCCGUGCG G UUCAGCAA | 2198 | UUGCUGAA GCCGAAAGGCGAGUGAGGUCU CGCACGGC | 5975 |
| 638 | GCGGUUCA G CAACAACC | 2199 | GGUUGUUG GCCGAAAGGCGAGUGAGGUCU UGAACCGC | 5976 |
| 649 | ACAACCCU G CCCUGUGC | 2200 | GCACAGGG GCCGAAAGGCGAGUGAGGUCU AGGGUUGU | 5977 |
| 654 | CCUGCCCU G UGCAACGU | 2201 | ACGUUGCA GCCGAAAGGCGAGUGAGGUCU AGGGCAGG | 5978 |
| 656 | UGCCCUGU G CAACGUGG | 2202 | CCACGUUG GCCGAAAGGCGAGUGAGGUCU ACAGGGCA | 5979 |
| 661 | UGUGCAAC G UGGAGAGC | 2203 | GCUCUCCA GCCGAAAGGCGAGUGAGGUCU GUUGCACA | 5980 |
| 668 | CGUGGAGA G CAUCCAGU | 2204 | ACUGGAUG GCCGAAAGGCGAGUGAGGUCU UCUCCACG | 5981 |
| 675 | AGCAUCCA G UGGCGGGA | 2205 | UCCCGCCA GCCGAAAGGCGAGUGAGGUCU UGGAUGCU | 5982 |
| 678 | AUCCAGUG G CGGGACAU | 2206 | AUGUCCCG GCCGAAAGGCGAGUGAGGUCU CACUGGAU | 5983 |
| 688 | GGGACAUA G UCAGCAGU | 2207 | ACUGCUGA GCCGAAAGGCGAGUGAGGUCU UAUGUCCC | 5984 |
| 692 | CAUAGUCA G CAGUGACU | 2208 | AGUCACUG GCCGAAAGGCGAGUGAGGUCU UGACUAUG | 5985 |
| 695 | AGUCAGCA G UGACUUUC | 2209 | GAAAGUCA GCCGAAAGGCGAGUGAGGUCU UGCUGACU | 5986 |
| 707 | CUUUCUCA G CAACAUGU | 2210 | ACAUGUUG GCCGAAAGGCGAGUGAGGUCU UGAGAAAG | 5987 |
| 714 | AGCAACAU G UCGAUGGA | 2211 | UCCAUCGA GCCGAAAGGCGAGUGAGGUCU AUGUUGCU | 5988 |
| 740 | CCACCUGG G CAGCUGCC | 2212 | GGCAGCUG GCCGAAAGGCGAGUGAGGUCU CCAGGUGG | 5989 |
| 743 | CCUGGGCA G CUGCCAAA | 2213 | UUUGGCAG GCCGAAAGGCGAGUGAGGUCU UGCCCAGG | 5990 |
| 746 | GGGCAGCU G CCAAAAGU | 2214 | ACUUUUGG GCCGAAAGGCGAGUGAGGUCU AGCUGCCC | 5991 |
| 753 | UGCCAAAA G UGUGAUCC | 2215 | GGAUCACA GCCGAAAGGCGAGUGAGGUCU UUUUGGCA | 5992 |
| 755 | CCAAAAGU G UGAUCCAA | 2216 | UUGGAUCA GCCGAAAGGCGAGUGAGGUCU ACUUUUGG | 5993 |
| 764 | UGAUCCAA G CUGUCCCA | 2217 | UGGGACAG GCCGAAAGGCGAGUGAGGUCU UUGGAUCA | 5994 |
| 767 | UCCAAGCU G UCCCAAUG | 2218 | CAUUGGGA GCCGAAAGGCGAGUGAGGUCU AGCUUGGA | 5995 |
| 779 | CAAUGGGA G CUGCUGGG | 2219 | CCCAGCAG GCCGAAAGGCGAGUGAGGUCU UCCCAUUG | 5996 |
| 782 | UGGGAGCU G CUGGGGUG | 2220 | CACCCCAG GCCGAAAGGCGAGUGAGGUCU AGCUCCCA | 5997 |
| 788 | CUGCUGGG G UGCAGGAG | 2221 | CUCCUGCA GCCGAAAGGCGAGUGAGGUCU CCCAGCAG | 5998 |
| 790 | GCUGGGGU G CAGGAGAG | 2222 | CUCUCCUG GCCGAAAGGCGAGUGAGGUCU ACCCCAGC | 5999 |
| 806 | GGAGAACU G CCAGAAAC | 2223 | GUUUCUGG GCCGAAAGGCGAGUGAGGUCU AGUUCUCC | 6000 |
| 830 | AAUCAUCU G UGCCCAGC | 2224 | GCUGGGCA GCCGAAAGGCGAGUGAGGUCU AGAUGAUU | 6001 |
| 832 | UCAUCUGU G CCCAGCAG | 2225 | CUGCUGGG GCCGAAAGGCGAGUGAGGUCU ACAGAUGA | 6002 |
| 837 | UGUGCCCA G CAGUGCUC | 2226 | GAGCACUG GCCGAAAGGCGAGUGAGGUCU UGGGCACA | 6003 |
| 840 | GCCCAGCA G UGCUCCGG | 2227 | CCGGAGCA GCCGAAAGGCGAGUGAGGUCU UGCUGGGC | 6004 |
| 842 | CCAGCAGU G CUCCGGGC | 2228 | GCCCGGAG GCCGAAAGGCGAGUGAGGUCU ACUGCUGG | 6005 |
| 849 | UGCUCCGG G CGCUGCCG | 2229 | CGGCAGCG GCCGAAAGGCGAGUGAGGUCU CCGGAGCA | 6006 |
| 851 | CUCCGGGC G CUGCCGUG | 2230 | CACGGCAG GCCGAAAGGCGAGUGAGGUCU GCCCGGAG | 6007 |
| 854 | CGGGCGCU G CCGUGGCA | 2231 | UGCCACGG GCCGAAAGGCGAGUGAGGUCU AGCGCCCG | 6008 |
| 857 | GCGCUGCC G UGGCAAGU | 2232 | ACUUGCCA GCCGAAAGGCGAGUGAGGUCU GGCAGCGC | 6009 |
| 860 | CUGCCGUG G CAAGUCCC | 2233 | GGGACUUG GCCGAAAGGCGAGUGAGGUCU CACGGCAG | 6010 |
| 864 | CGUGGCAA G UCCCCCAG | 2234 | CUGGGGGA GCCGAAAGGCGAGUGAGGUCU UUGCCACG | 6011 |
| 872 | GUCCCCCA G UGACUGCU | 2235 | AGCAGUCA GCCGAAAGGCGAGUGAGGUCU UGGGGGAC | 6012 |
| 878 | CAGUGACU G CUGCCACA | 2236 | UGUGGCAG GCCGAAAGGCGAGUGAGGUCU AGUCACUG | 6013 |
| 881 | UGACUGCU G CCACAACC | 2237 | GGUUGUGG GCCGAAAGGCGAGUGAGGUCU AGCAGUCA | 6014 |
| 891 | CACAACCA G UGUGCUGC | 2238 | GCAGCACA GCCGAAAGGCGAGUGAGGUCU UGGUUGUG | 6015 |
| 893 | CAACCAGU G UGCUGCAG | 2239 | CUGCAGCA GCCGAAAGGCGAGUGAGGUCU ACUGGUUG | 6016 |
| 895 | ACCAGUGU G CUGCAGGC | 2240 | GCCUGCAG GCCGAAAGGCGAGUGAGGUCU ACACUGGU | 6017 |
| 898 | AGUGUGCU G CAGGCUGC | 2241 | GCAGCCUG GCCGAAAGGCGAGUGAGGUCU AGCACACU | 6018 |
| 902 | UGCUGCAG G CUCCACAG | 2242 | CUGUGCAG GCCGAAAGGCGAGUGAGGUCU CUGCAGCA | 6019 |
| 905 | UGCAGGCU G CACAGGCC | 2243 | GGCCUGUG GCCGAAAGGCGAGUGAGGUCU AGCCUGCA | 6020 |
| 911 | CUGCACAG G CCCCCGGG | 2244 | CCCGGGGG GCCGAAAGGCGAGUGAGGUCU CUGUGCAG | 6021 |
| 923 | CCGGGAGA G CGACUGCC | 2245 | GGCAGUCG GCCGAAAGGCGAGUGAGGUCU UCUCCCGG | 6022 |
| 929 | GAGCGACU G CCUGGUCU | 2246 | AGACCAGG GCCGAAAGGCGAGUGAGGUCU AGUCGCUC | 6023 |
| 934 | ACUGCCUG G UCUGCCGC | 2247 | GCGGCAGA GCCGAAAGGCGAGUGAGGUCU CAGGCAGU | 6024 |
| 938 | CCUGGUCU G CCGCAAAU | 2248 | AUUUGCGG GCCGAAAGGCGAGUGAGGUCU AGACCAGG | 6025 |
| 941 | GGUCUGCC G CAAAUUCC | 2249 | GGAAUUUG GCCGAAAGGCGAGUGAGGUCU GGCAGACC | 6026 |
| 958 | GAGACGAA G CCACGUGC | 2250 | GCACGUGG GCCGAAAGGCGAGUGAGGUCU UUCGUCUC | 6027 |
| 963 | GAAGCCAC G UGCAAGGA | 2251 | UCCUUGCA GCCGAAAGGCGAGUGAGGUCU GUGGCUUC | 6028 |
| 965 | AGCCACGU G CAAGGACA | 2252 | UGUCCUUG GCCGAAAGGCGAGUGAGGUCU ACGUGGCU | 6029 |
| 977 | GGACACCU G CCCCCCAC | 2253 | GUGGGGGG GCCGAAAGGCGAGUGAGGUCU AGGUGUCC | 6030 |
| 990 | CCACUCAU G CUCUACAA | 2254 | UUGUAGAG GCCGAAAGGCGAGUGAGGUCU AUGAGUGG | 6031 |
| 1008 | CCCACCAC G UACCAGAU | 2255 | AUCUGGUA GCCGAAAGGCGAGUGAGGUCU GUGGUGGG | 6032 |
| 1021 | AGAUGGAU G UGAACCCC | 2256 | GGGGUUCA GCCGAAAGGCGAGUGAGGUCU AUCCAUCU | 6033 |
| 1034 | CCCCGAGG G CAAAUACA | 2257 | UGUAUUUG GCCGAAAGGCGAGUGAGGUCU CCUCGGGG | 6034 |
| 1043 | CAAAUACA G CUUUGGUG | 2258 | CACCAAAG GCCGAAAGGCGAGUGAGGUCU UGUAUUUG | 6035 |
| 1049 | CAGCUUUG G UGCCACCU | 2259 | AGGUGGCA GCCGAAAGGCGAGUGAGGUCU CAAAGCUG | 6036 |
| 1051 | GCUUUGGU G CCACCUGC | 2260 | GCAGGUGG GCCGAAAGGCGAGUGAGGUCU ACCAAAGC | 6037 |
| 1058 | UGCCACCU G CGUGAAGA | 2261 | UCUUCACG GCCGAAAGGCGAGUGAGGUCU AGGUGGCA | 6038 |
| 1060 | CCACCUGC G UGAAGAAG | 2262 | CUUCUUCA GCCGAAAGGCGAGUGAGGUCU GCAGGUGG | 6039 |
| 1068 | GUGAAGAA G UGUCCCCG | 2263 | CGGGGACA GCCGAAAGGCGAGUGAGGUCU UUCUUCAC | 6040 |
| 1070 | GAAGAAGU G UCCCCGUA | 2264 | UACGGGGA GCCGAAAGGCGAGUGAGGUCU ACUUCUUC | 6041 |
| 1076 | GUGUCCCC G UAAUUAUG | 2265 | CAUAAUUA GCCGAAAGGCGAGUGAGGUCU GGGGACAC | 6042 |
| 1084 | GUAAUUAU G UGGUGACA | 2266 | UGUCACCA GCCGAAAGGCGAGUGAGGUCU AUAAUUAC | 6043 |
| 1087 | AUUAUGUG G UGACAGAU | 2267 | AUCUGUCA GCCGAAAGGCGAGUGAGGUCU CACAUAAU | 6044 |
| 1100 | AGAUCACG G CUCGUGCG | 2268 | CGCACGAG GCCGAAAGGCGAGUGAGGUCU CGUGAUCU | 6045 |
| 1104 | CACGGCUC G UGCGUCCG | 2269 | CGGACGCA GCCGAAAGGCGAGUGAGGUCU GAGCCGUG | 6046 |
| 1106 | CGGCUCGU G CGUCCGAG | 2270 | CUCGGACG GCCGAAAGGCGAGUGAGGUCU ACGAGCCG | 6047 |
| 1108 | GCUCGUGC G UCCGAGCC | 2271 | GGCUCGGA GCCGAAAGGCGAGUGAGGUCU GCACGAGC | 6048 |
| 1114 | GCGUCCGA G CCUGUGGG | 2272 | CCCACAGG GCCGAAAGGCGAGUGAGGUCU UCGGACGC | 6049 |
| 1118 | CCGAGCCU G UGGGGCCG | 2273 | CGGCCCCA GCCGAAAGGCGAGUGAGGUCU AGGCUCGG | 6050 |
| 1123 | CCUGUGGG G CCGACAGC | 2274 | GCUGUCGG GCCGAAAGGCGAGUGAGGUCU CCCACAGG | 6051 |
| 1130 | GCCCGACA G CUAUGAGA | 2275 | UCUCAUAC GCCGAAAGGCGAGUGAGGUCU UGUCCGCC | 6052 |
| 1151 | CGAACACC G CGUCCGCA | 2276 | UGCGGACG GCCGAAAGGCGACUCAGGUCU CCUCUUCC | 6053 |
| 1153 | AAGACGGC G UCCGCAAG | 2277 | CUUGCCCA GCCGAAAGGCGAGUGAGGUCU GCCGUCUU | 6054 |
| 1157 | CGGCCUCC G CAAGUGUA | 2278 | UACACUUG GCCGAAAGGCGACUCAGGUCU GCACGCCC | 6055 |
| 1161 | CUCCGCAA G UGUAACAA | 2279 | UUCUUACA GCCCAAAGGCGAGUGAGGUCU UUGCCCAC | 6056 |
| 1163 | CCGCAACU G UAAGAAGU | 2280 | ACUUCUUA GCCCAAAGGCGAGUGAGGUCU ACUUGCGG | 6057 |
| 1170 | UGUAAGAA G UGCGAAGG | 2281 | CCUUCGCA GCCGAAAGGCGAGUGAGGUCU UUCUUACA | 6058 |
| 1172 | UAACAACU G CGAAGCGC | 2282 | GCCCUUCG GCCCAAAGGCGAGUGAGGUCU ACUUCUUA | 6059 |
| 1179 | UGCGAAGG G CCUUGCCG | 2283 | CGCCAACG GCCGAAAGGCGAGUGAGGUCU CCUUCGCA | 6060 |
| 1184 | ACGGCCUU G CCCCAAAG | 2284 | CUUUGCCG GCCGAAAGGCCAGUCAGGUCU AACGCCCU | 6061 |
| 1187 | GCCUUGCC G CAAAGUGU | 2285 | ACACUUUG GCCCAAACGCGAGUCAGGUCU GGCAAGGC | 6062 |
| 1192 | GCCCCAAA G UGUCUAAC | 2286 | GUUACACA GCCGAAAGCCGAGUCAGGUCU UUUGCCCC | 6063 |
| 1194 | CCCAAACU G UGUAACGG | 2287 | CCCUUACA GCCGAAAGGCGAGUGAGGUCU ACUUUCCC | 6064 |
| 1196 | CAAACUGU G UAACGGAA | 2288 | UUCCGUUA GCCCAAAGGCGAGUGAGGUCU ACACUUUG | 6065 |
| 1208 | CGGAAUAG G UAUUGGUG | 2289 | CACCAAUA GCCGAAACGCGACUGAGGUCU CUAUUCCG | 6066 |
| 1214 | ACCUAUUG G UGAAUUUA | 2290 | UAAAUUCA GCCCAAACGCGACUCAGGUCU CAAUACCU | 6067 |
| 1243 | CCAUAAAU G CUACGAAU | 2291 | AUUCGUAG GCCGAAACCCGAGUGAGGUCU AUUUAUCG | 6068 |
| 1271 | CAAAAACU G CACCUCCA | 2292 | UGGAGGUG GCCGAAAGGCGAGUGAGGUCU AGUUUUUG | 6069 |
| 1283 | CUCCAUCA G UGCCCAUC | 2293 | GAUCGCCA GCCCAAAGGCGACUCAGGUCU UGAUCCAG | 6070 |
| 1286 | CAUCACUC G CCAUCUCC | 2294 | CCACAUCG GCCGAAACCCGACUCAGGUCU CACUGAUC | 6071 |
| 1302 | CACAUCCU G CCGCUCGC | 2295 | GCCACCGG GCCGAAAGGCCACUCAGGUCU AGGAUGUC | 6072 |
| 1306 | UCCUGCCC G UCGCAUUU | 2296 | AAAUGCCA GCCGAAAGGCGACUCAGGUCU CCGCACGA | 6073 |
| 1309 | UCCCCCUG G CAUUUAGG | 2297 | CCUAAAUG GCCGAAAGGCGAGUCAGGUCU CACCGGCA | 6074 |
| 1319 | AUUUAGGG G UGACUCCU | 2298 | AGGAGUCA GCCGAAACCCGAGUGAGGUCU CCCUAAAU | 6075 |
| 1378 | UGAAAACC G UAAACGAA | 2299 | UUCCUUUA GCCCAAAGGCGAGUGAGGUCU GGUUUUCA | 6076 |
| 1395 | AUCACACC G UUUUUGCU | 2300 | AGCAAAAA GCCCAAAGGCGAGUGAGGUCU CCUGUGAU | 6077 |
| 1401 | GGGUUUUU G CUCAUUCA | 2301 | UCAAUCAG GCCGAAAGGCGAGUGAGGUCU AAAAACCC | 6078 |
| 1411 | UGAUUCAC G CUUGCCCU | 2302 | ACGCCAAC GCCCAAAGGCGAGUGAGGUCU CUGAAUCA | 6079 |
| 1416 | CAGGCUUG G CCUGAAAA | 2303 | UUUUCAGG GCCGAAACCCGAGUCAGGUCU CAAGCCUG | 6080 |
| 1441 | ACCUCCAU G CCUUUGAG | 2304 | CUCAAAGG GCCGAAAGGCGAGUGAGGUCU AUGGAGGU | 6081 |
| 1466 | AAUCAUAC G CCGCACCA | 2305 | UCCUGCCC GCCGAAAGGCGAGUGAGGUCU GUAUGAUU | 6082 |
| 1469 | CAUACGCG G CAGGACCA | 2306 | UGGUCCUG GCCGAAAGGCGAGUGAGGUCU CGCGUAUG | 6083 |
| 1479 | ACCACCAA G CAACAUGG | 2307 | CCAUGUUG GCCGAAACGCGAGUGAGGUCU UUCGUCCU | 6084 |
| 1487 | CCAACAUC G UCAGUUUU | 2308 | AAAACUGA GCCGAAACGCGAGUGAGGUCU CAUGUUCC | 6085 |
| 1491 | CAUGGUCA G UUUUCUCU | 2309 | ACACAAAA GCCCAAAGGCGAGUGAGGUCU UGACCAUC | 6086 |
| 1501 | UUUCUCUU G CAGUCGUC | 2310 | GACCACUG GCCGAAAGGCGAGUGAGGUCU AACAGAAA | 6087 |
| 1504 | CUCUUCCA G UCGUCAGC | 2311 | CCUGACGA GCCGAAAGGCCACUCAGGUCU UGCAAGAG | 6088 |
| 1507 | UUGCAGUC G UCAGCCUG | 2312 | CAGGCUGA GCCGAAAGGCCAGUGAGGUCU GACUCCAA | 6089 |
| 1511 | AGUCGUCA G CCUCAACA | 2313 | UGUUCACG GCCGAAAGGCGACUGAGGUCU UGACGACU | 6090 |
| 1538 | GCGAUUAC G CUCCCUCA | 2314 | UGAGGGAG GCCCAAAGGCGAGUGAGGUCU GUAAUCCC | 6091 |
| 1556 | GGAGAUAA G UGAUGGAG | 2315 | CUCCAUCA GCCCAAAGGCGAGUGAGGUCU UUAUCUCC | 6092 |
| 1567 | AUGGAGAU G UGAUAAUU | 2316 | AAUUAUCA GCCCAAACGCGAGUGAGGUCU AUCUCCAU | 6093 |
| 1593 | AAAAAUUU G UGCUAUGC | 2317 | GCAUACCA GCCGAAAGCCCACUCAGGUCU AAAUUUUU | 6094 |
| 1595 | AAAUUUGU G CUAUGCAA | 2318 | UUGCAUAC GCCGAAAGGCCAGUGAGGUCU ACAAAUUU | 6095 |
| 1600 | UGUGCUAU G CAAAUACA | 2319 | UGUAUUUG GCCGAAAGGCGAGUGAGGUCU AUAGCACA | 6096 |
| 1626 | AAAAAACU G UUUGGGAC | 2320 | GUCCCAAA GCCGAAAGGCGAGUGAGGUCU AGUUUUUU | 6097 |
| 1640 | GACCUCCG G UCAGAAAA | 2321 | UUUUCUGA GCCGAAAGGCGAGUGAGGUCU CGGAGGUC | 6096 |
| 1661 | AAUUAUAA G CAACAGAG | 2322 | CUCUGUUG GCCGAAAGGCGAGUGAGGUCU UUAUAAUU | 6099 |
| 1670 | CAACAGAG G UGAAAACA | 2323 | UGUUUUCA GCCGAAAGGCGAGUGAGGUCU CUCUGUUG | 6100 |
| 1679 | UGAAAACA G CUGCAAGG | 2324 | CCUUGCAG GCCGAAAGGCGAGUGAGGUCU UGUUUUCA | 6101 |
| 1682 | AAACAGCU G CAAGGCCA | 2325 | UGGCCUUG GCCGAAAGGCGAGUGAGGUCU AGCUGUUU | 6102 |
| 1687 | GCUGCAAG G CCACAGGC | 2326 | GCCUGUGG GCCGAAAGGCGAGUGAGGUCU CUUGCAGC | 6103 |
| 1694 | GGCCACAG G CCAGGUCU | 2327 | AGACCUGG GCCGAAAGGCGAGUGAGGUCU CUGUGGCC | 6104 |
| 1699 | CAGGCCAG G UCUGCCAU | 2328 | AUGGOAGA GCCGAAAGGCGAGUGAGGUCU CUGGCCUG | 6105 |
| 1703 | CCAGGUCU G CCAUGCCU | 2329 | AGGCAUGG GCCGAAAGGCGAGUGAGGUCU AGACCUGG | 6106 |
| 1708 | UCUGCCAU G CCUUGUGC | 2330 | GCACAAGG GCCGAAAGGCGAGUGAGGUCU AUGGCAGA | 6107 |
| 1713 | CAUGCCUU G UGCUCCCC | 2331 | GGGGAGCA GCCGAAAGGCGAGUGAGGUCU AAGGCAUG | 6108 |
| 1715 | UGCCUUGU G CUCCCCCG | 2332 | CGGGGGAG GCCGAAAGGCGAGUGAGGUCU ACAAGGCA | 6109 |
| 1727 | CCCCGAGG G CUGCUGGG | 2333 | CCCAGCAG GCCGAAAGGCGAGUGAGGUCU CCUCGGGG | 6110 |
| 1730 | CGAGGGCU G CUGGGGCC | 2334 | GGCCCCAG GCCGAAAGGCGAGUGAGGUCU AGCCCUCG | 6111 |
| 1736 | CUGCUGGG G CCCGGAGC | 2335 | GCUCCGGG GCCGAAAGGCGAGUGAGGUCU CCCAGCAG | 6112 |
| 1743 | GGCCCGGA G CCCAGGGA | 2336 | UCCCUGGG GCCGAAAGGCGAGUGAGGUCU UCCGGGCC | 6113 |
| 1754 | CAGGGACU G CGUCUCUU | 2337 | AAGAGACG GCCGAAAGGCGAGUGAGGUCU AGUCCCUG | 6114 |
| 1756 | GGGACUGC G UCUCUUGC | 2338 | GCAAGAGA GCCGAAAGGCGAGUGAGGUCU GCAGUCCC | 6115 |
| 1763 | CGUCUCUU G CCGGAAUG | 2339 | CAUUCCGG GCCGAAAGGCGAGUGAGGUCU AAGAGACG | 6116 |
| 1771 | GCCGGAAU G UCAGCCGA | 2340 | UCGGCUGA GCCGAAAGGCGAGUGAGGUCU AUUCCGGC | 6117 |
| 1775 | GAAUGUCA G CCGAGGCA | 2341 | UGCCUCGG GCCGAAAGGCGAGUGAGGUCU UGACAUUC | 6118 |
| 1781 | CAGCCGAG G CAGGGAAU | 2342 | AUUCCCUG GCCGAAAGGCGAGUGAGGUCU CUCGGCUG | 6119 |
| 1790 | CAGGGAAU G CGUGGACA | 2343 | UGUCCACG GCCGAAAGGCGAGUGAGGUCU AUUCCCUG | 6120 |
| 1792 | GGGAAUGC G UGGACAAG | 2344 | CUUGUCCA GCCGAAAGGCGAGUGAGGUCU GCAUUCCC | 6121 |
| 1800 | GUGGACAA G UGCAAGCU | 2345 | AGCUUGCA GCCGAAAGGCGAGUGAGGUCU UUGUCCAC | 6122 |
| 1802 | GGACAAGU G CAAGCUUC | 2346 | GAAGCUUG GCCGAAAGGCGAGUGAGGUCU ACUUGUCC | 6123 |
| 1806 | AAGUGCAA G CUUCUGGA | 2347 | UCCAGAAG GCCGAAAGGCGAGUGAGGUCU UUGCACUU | 6124 |
| 1817 | UCUGGAGG G UGAGCCAA | 2348 | UUGGCUCA GCCGAAAGGCGAGUGAGGUCU CCUCCAGA | 6125 |
| 1821 | GAGGGUGA G CCAAGGGA | 2349 | UCCCUUGG GCCGAAAGGCGAGUGAGGUCU UCACCCUC | 6126 |
| 1830 | CCAAGGGA G UUUGUGGA | 2350 | UCCACAAA GCCGAAAGGCGAGUGAGGUCU UCCCUUGG | 6127 |
| 1834 | GGGAGUUU G UGGAGAAC | 2351 | GUUCUCCA GCCGAAAGGCGAGUGAGGUCU AAACUCCC | 6128 |
| 1848 | AACUCUGA G UGCAUACA | 2352 | UGUAUGCA GCCGAAAGGCGAGUGAGGUCU UCAGAGUU | 6129 |
| 1850 | CUCUGAGU G CAUACAGU | 2353 | ACUGUAUG GCCGAAAGGCGAGUGAGGUCU ACUCAGAG | 6130 |
| 1857 | UGCAUACA G UGCCACCC | 2354 | GGGUGGCA GCCGAAAGGCGAGUGAGGUCU UGUAUGCA | 6131 |
| 1859 | CAUACAGU G CCACCCAG | 2355 | CUGGGUGG GCCGAAAGGCGAGUGAGGUCU ACUGUAUG | 6132 |
| 1869 | CACCCAGA G UGCCUGCC | 2356 | GGCAGGCA GCCGAAAGGCGAGUGAGGUCU UCUGGGUG | 6133 |
| 1871 | CCCAGAGU G CCUGCCUC | 2357 | GAGGCAGG GCCGAAAGGCGAGUGAGGUCU ACUCUGGG | 6134 |
| 1875 | GAGUGCCU G CCUCAGGC | 2358 | GCCUGAGG GCCGAAAGGCGAGUGAGGUCU AGGCACUC | 6135 |
| 1882 | UGCCUCAG G CCAUGAAC | 2359 | GUUCAUGG GCCGAAAGGCGAGUGAGGUCU CUGAGGCA | 6136 |
| 1898 | CAUCACCU G CACAGGAC | 2360 | GUCCUGUG GCCGAAAGGCGAGUGAGGUCU AGGUGAUG | 6137 |
| 1922 | AGACAACU G UAUCCAGU | 2361 | ACUGGAUA GCCGAAAGGCGAGUGAGGUCU AGUUGUCU | 6138 |
| 1929 | UGUAUCCA G UGUGCCCA | 2362 | UGGGCACA GCCGAAAGGCGAGUGAGGUCU UGGAUACA | 6139 |
| 1931 | UAUCCAGU G UGCCCACU | 2363 | AGUGGGCA GCCGAAAGGCGAGUGAGGUCU ACUGGAUA | 6140 |
| 1933 | UCCAGUGU G CCCACUAC | 2364 | GUAGUGGG GCCGAAAGGCGAGUGAGGUCU ACACUGGA | 6141 |
| 1949 | CAUUGACG G CCCCCACU | 2365 | AGUGGGGG GCCGAAAGGCGAGUGAGGUCU CGUCAAUG | 6142 |
| 1958 | CCCCCACU G CGUCAAGA | 2366 | UCUUGACG GCCGAAAGGCGAGUGAGGUCU AGUGGGGG | 6143 |
| 1960 | CCCACUGC G UCAAGACC | 2367 | GGUCUUGA GCCGAAAGGCGAGUGAGGUCU GCAGUGGG | 6144 |
| 1970 | CAAGACCU G CCCGGCAG | 2368 | CUGCCGGG GCCGAAAGGCGAGUGAGGUCU AGGUCUUG | 6145 |
| 1975 | CCUGCCCG G CAGGAGUC | 2369 | GACUCCUG GCCGAAAGGCGAGUGAGGUCU CGGGCAGG | 6146 |
| 1981 | CGGCAGGA G UCAUGGGA | 2370 | UCCCAUGA GCCGAAAGGCGAGUGAGGUCU UCCUGCCG | 6147 |
| 2005 | ACACCCUG G UCUGGAAG | 2371 | CUUCCAGA GCCGAAAGGCGAGUGAGGUCU CAGGGUGU | 6148 |
| 2013 | GUCUGGAA G UACGCAGA | 2372 | UCUGCGUA GCCGAAAGGCGAGUGAGGUCU UUCCAGAC | 6149 |
| 2017 | GGAAGUAC G CAGACGCC | 2373 | GGCGUCUG GCCGAAAGGCGAGUGAGGUCU GUACUUCC | 6150 |
| 2023 | ACGCAGAC G CCGGCCAU | 2374 | AUGGCCGG GCCGAAAGGCGAGUGAGGUCU GUCUGCGU | 6151 |
| 2027 | AGACGCCG G CCAUGUGU | 2375 | ACACAUGG GCCGAAAGGCGAGUGAGGUCU CGGCGUCU | 6152 |
| 2032 | CCGGCCAU G UGUGCCAC | 2376 | GUGGCACA GCCGAAAGGCGAGUGAGGUCU AUGGCCGG | 6153 |
| 2034 | GGCCAUGU G UGCCACCU | 2377 | AGGUGGCA GCCGAAAGGCGAGUGAGGUCU ACAUGGCC | 6154 |
| 2036 | CCAUGUGU G CCACCUGU | 2378 | ACAGGUGG GCCGAAAGGCGAGUGAGGUCU ACACAUGG | 6155 |
| 2043 | UGCCACCU G UGCCAUCC | 2379 | GGAUGGCA GCCGAAAGGCGAGUGAGGUCU AGGUGGCA | 6156 |
| 2045 | CCACCUGU G CCAUCCAA | 2380 | UUGGAUGG GCCGAAAGGCGAGUGAGGUCU ACAGGUGG | 6157 |
| 2057 | UCCAAACU G CACCUACG | 2381 | CGUAGGUG GCCGAAAGGCGAGUGAGGUCU AGUUUGGA | 6158 |
| 2069 | CUACGGAU G CACUGGGC | 2382 | GCCCAGUG GCCGAAAGGCGAGUGAGGUCU AUCCGUAG | 6159 |
| 2076 | UGCACUGG G CCAGGUCU | 2383 | AGACCUGG GCCGAAAGGCGAGUGAGGUCU CCAGUGCA | 6160 |
| 2081 | UGGGCCAG G UCUUGAAG | 2384 | CUUCAAGA GCCGAAAGGCGAGUGAGGUCU CUGGCCCA | 6161 |
| 2090 | UCUUGAAG G CUGUCCAA | 2385 | UUGGACAG GCCGAAAGGCGAGUGAGGUCU CUUCAAGA | 6162 |
| 2093 | UGAAGGCU G UCCAACGA | 2386 | UCGUUGGA GCCGAAAGGCGAGUGAGGUCU AGCCUUCA | 6163 |
| 2106 | ACGAAUGG G CCUAAGAU | 2387 | AUCUUAGG GCCGAAAGGCGAGUGAGGUCU CCAUUCGU | 6164 |
| 2118 | AAGAUCCC G UCCAUCGC | 2388 | GCGAUGGA GCCGAAAGGCGAGUGAGGUCU GGGAUCUU | 6165 |
| 2125 | CGUCCAUC G CCACUGGG | 2389 | CCCAGUGG GCCGAAAGGCGAGUGAGGUCU GAUGGACG | 6166 |
| 2137 | CUGGGAUG G UGGGGGCC | 2390 | GGCCCCCA GCCGAAAGGCGAGUGAGGUCU CAUCCCAG | 6167 |
| 2143 | UGGUGGGG G CCCUCCUC | 2391 | GAGGAGGG GCCGAAAGGCGAGUGAGGUCU CCCCACCA | 6168 |
| 2154 | CUCCUCUU G CUGCUGGU | 2392 | ACCAGCAG GCCGAAAGGCGAGUGAGGUCU AAGAGGAG | 6169 |
| 2157 | CUCUUGCU G CUGGUGGU | 2393 | ACCACCAG GCCGAAAGGCGAGUGAGGUCU AGCAAGAG | 6170 |
| 2161 | UGCUGCUG G UGGUGGCC | 2394 | GGCCACCA GCCGAAAGGCGAGUGAGGUCU CAGCAGCA | 6171 |
| 2164 | UGCUGGUG G UGGCCCUG | 2395 | CAGGGCCA GCCGAAAGGCGAGUGAGGUCU CACCAGCA | 6172 |
| 2167 | UGGUGGUG G CCCUGGGG | 2396 | CCCCAGGG GCCGAAAGGCGAGUGAGGUCU CACCACCA | 6173 |
| 2180 | GGGGAUCG G CCUCUUCA | 2397 | UGAAGAGG GCCGAAAGGCGAGUGAGGUCU CGAUCCCC | 6174 |
| 2190 | CUCUUCAU G CGAAGGCG | 2398 | CGCCUUCG GCCGAAAGGCGAGUGAGGUCU AUGAAGAG | 6175 |
| 2196 | AUGCGAAG G CGCCACAU | 2399 | AUGUGGCG GCCGAAAGGCGAGUGAGGUCU CUUCGCAU | 6176 |
| 2198 | GCGAAGGC G CCACAUCG | 2400 | CGAUGUGG GCCGAAAGGCGAGUGAGGUCU GCCUUCGC | 6177 |
| 2206 | GCCACAUC G UUCGGAAG | 2401 | CUUCCGAA GCCGAAAGGCGAGUGAGGUCU GAUGUGGC | 6178 |
| 2214 | GUUCGGAA G CGCACGCU | 2402 | AGCGUGCG GCCGAAAGGCGAGUGAGGUCU UUCCGAAC | 6179 |
| 2216 | UCGGAAGC G CACGCUGC | 2403 | GCAGCGUG GCCGAAAGGCGAGUGAGGUCU GCUUCCGA | 6180 |
| 2220 | AAGCGCAC G CUGCGGAG | 2404 | CUCCGCAG GCCGAAAGGCGAGUGAGGUCU GUGCGCUU | 6181 |
| 2223 | CGCACGCU G CGGAGGCU | 2405 | AGCCUCCG GCCGAAAGGCGAGUGAGGUCU AGCGUGCG | 6182 |
| 2229 | CUGCGGAG G CUGCUGCA | 2406 | UGCAGCAG GCCGAAAGGCGAGUGAGGUCU CUCCGCAG | 6183 |
| 2232 | CGGAGGCU G CUGCAGGA | 2407 | UCCUGCAG GCCGAAAGGCGAGUGAGGUCU AGCCUCCG | 6184 |
| 2235 | AGGCUGCU G CAGGAGAG | 2408 | CUCUCCUG GCCGAAAGGCGAGUGAGGUCU AGCAGCCU | 6185 |
| 2247 | GAGAGGGA G CUUGUGGA | 2409 | UCCACAAG GCCGAAAGGCGAGUGAGGUCU UCCCUCUC | 6186 |
| 2251 | GGGAGCUU G UGGAGCCU | 2410 | AGGCUCCA GCCGAAAGGCGAGUGAGGUCU AAGCUCCC | 6187 |
| 2256 | CUUGUGGA G CCUCUUAC | 2411 | GUAAGAGG GCCGAAAGGCGAGUGAGGUCU UCCACAAG | 6188 |
| 2270 | UACACCCA G UGGAGAAG | 2412 | CUUCUCCA GCCGAAAGGCGAGUGAGGUCU UGGGUGUA | 6189 |
| 2278 | GUGGAGAA G CUCCCAAC | 2413 | GUUGGGAG GCCGAAAGGCGAGUGAGGUCU UUCUCCAC | 6190 |
| 2290 | CCAACCAA G CUCUCUUG | 2414 | CAAGAGAG GCCGAAAGGCGAGUGAGGUCU UUGGUUGG | 6191 |
| 2335 | AGAUCAAA G UGCUGGGC | 2415 | GCCCAGCA GCCGAAAGGCGAGUGAGGUCU UUUGAUCU | 6192 |
| 2337 | AUCAAAGU G CUGGGCUC | 2416 | GAGCCCAG GCCGAAAGGCGAGUGAGGUCU ACUUUGAU | 6193 |
| 2342 | AGUGCUGG G CUCCGGUG | 2417 | CACCGGAG GCCGAAAGGCGAGUGAGGUCU CCAGCACU | 6194 |
| 2348 | GGGCUCCG G UGCGUUCG | 2418 | CGAACGCA GCCGAAAGGCGAGUGAGGUCU CGGAGCCC | 6195 |
| 2350 | GCUCCGGU G CGUUCGGC | 2419 | GCCGAACG GCCGAAAGGCGAGUGAGGUCU ACCGGAGC | 6196 |
| 2352 | UCCGGUGC G UUCGGCAC | 2420 | GUGCCGAA GCCGAAAGGCGAGUGAGGUCU GCACCGGA | 6197 |
| 2357 | UGCGUUCG G CACGGUGU | 2421 | ACACCGUG GCCGAAAGGCGAGUGAGGUCU CGAACGCA | 6198 |
| 2362 | UCGGCACG G UGUAUAAG | 2422 | CUUAUACA GCCGAAAGGCGAGUGAGGUCU CGUGCCGA | 6199 |
| 2364 | GGCACGGU G UAUAAGGG | 2423 | CCCUUAUA GCCGAAAGGCGAGUGAGGUCU ACCGUGCC | 6200 |
| 2390 | CCCAGAAG G UGAGAAAG | 2424 | CUUUCUCA GCCGAAAGGCGAGUGAGGUCU CUUCUGGG | 6201 |
| 2398 | GUGAGAAA G UUAAAAUU | 2425 | AAUUUUAA GCCGAAAGGCGAGUGAGGUCU UUUCUCAC | 6202 |
| 2410 | AAAUUCCC G UCGCUAUC | 2426 | GAUAGCGA GCCGAAAGGCGAGUGAGGUCU GGGAAUUU | 6203 |
| 2413 | UUCCCGUC G CUAUCAAG | 2427 | CUUGAUAG GCCGAAAGGCGAGUGAGGUCU GACGGGAA | 6204 |
| 2434 | UAAGAGAA G CAACAUCU | 2428 | AGAUGUUG GCCGAAAGGCGAGUGAGGUCU UUCUCUUA | 6205 |
| 2449 | CUCCGAAA G CCAACAAG | 2429 | CUUGUUGG GCCGAAAGGCGAGUGAGGUCU UUUCGGAG | 6206 |
| 2473 | UCGAUGAA G CCUACGUG | 2430 | CACGUAGG GCCGAAAGGCGAGUGAGGUCU UUCAUCGA | 6207 |
| 2479 | AAGCCUAC G UGAUGGCC | 2431 | GGCCAUCA GCCGAAAGGCGAGUGAGGUCU GUAGGCUU | 6208 |
| 2485 | ACGUGAUG G CCAGCGUG | 2432 | CACGCUGG GCCGAAAGGCGAGUGAGGUCU CAUCACGU | 6209 |
| 2489 | GAUGGCCA G CGUGGACA | 2433 | UGUCCACG GCCGAAAGGCGAGUGAGGUCU UGGCCAUC | 6210 |
| 2491 | UGGCCAGC G UGGACAAC | 2434 | GUUGUCCA GCCGAAAGGCGAGUGAGGUCU GCUGGCCA | 6211 |
| 2506 | ACCCCCAC G UGUGCCGC | 2435 | GCGGCACA GCCGAAAGGCGAGUGAGGUCU GUGGGGGU | 6212 |
| 2508 | CCCCACGU G UGCCGCCU | 2436 | AGGCGGCA GCCGAAAGGCGAGUGAGGUCU ACGUGGGG | 6213 |
| 2510 | CCACGUGU G CCGCCUGC | 2437 | GCAGGCGG GCCGAAAGGCGAGUGAGGUCU ACACGUGG | 6214 |
| 2513 | CGUGUGCC G CCUGCUGG | 2438 | CCAGCAGG GCCGAAAGGCGAGUGAGGUCU GGCACACG | 6215 |
| 2517 | UGCCGCCU G CUGGGCAU | 2439 | AUGCCCAG GCCGAAAGGCGAGUGAGGUCU AGGCGGCA | 6216 |
| 2522 | CCUGCUGG G CAUCUGCC | 2440 | GGCAGAUG GCCGAAAGGCGAGUGAGGUCU CCAGCAGG | 6217 |
| 2528 | GGGCAUCU G CCUCACCU | 2441 | AGGUGAGG GCCGAAAGGCGAGUGAGGUCU AGAUGCCC | 6218 |
| 2542 | CCUCCACC G UGCAACUC | 2442 | GAGUUGCA GCCGAAAGGCGAGUGAGGUCU GGUGGAGG | 6219 |
| 2544 | UCCACCGU G CAACUCAU | 2443 | AUGAGUUG GCCGAAAGGCGAGUGAGGUCU ACGGUGGA | 6220 |
| 2556 | CUCAUCAC G CAGCUCAU | 2444 | AUGAGCUG GCCGAAAGGCGAGUGAGGUCU GUGAUGAG | 6221 |
| 2559 | AUCACGCA G CUCAUGCC | 2445 | GGCAUGAG GCCGAAAGGCGAGUGAGGUCU UGCGUGAU | 6222 |
| 2565 | CAGCUCAU G CCCUUCGG | 2446 | CCGAAGGG GCCGAAAGGCGAGUGAGGUCU AUGAGCUG | 6223 |
| 2573 | GCCCUUCG G CUGCCUCC | 2447 | GGAGGCAG GCCGAAAGGCGAGUGAGGUCU CGAAGGGC | 6224 |
| 2576 | CUUCGGCU G CCUCCUGG | 2448 | CCAGGAGG GCCGAAAGGCGAGUGAGGUCU AGCCGAAG | 6225 |
| 2590 | UGGACUAU G UCCGGGAA | 2449 | UUCCCGGA GCCGAAAGGCGAGUGAGGUCU AUAGUCCA | 6226 |
| 2615 | CAAUAUUG G CUCCCAGU | 2450 | ACUGGGAG GCCGAAAGGCGAGUGAGGUCU CAAUAUUG | 6227 |
| 2622 | GGCUCCCA G UACCUGUU | 2451 | AGCAGGUA GCCGAAAGGCGAGUGAGGUCU UGGGAGCC | 6228 |
| 2628 | CAGUACCU G CUCAACUG | 2452 | CAGUUGAG GCCGAAAGGCGAGUGAGGUCU AGGUACUG | 6229 |
| 2637 | CUCAACUG G UGUGUGCA | 2453 | UCCACACA GCCGAAAGGCGAGUGAGGUCU CAGUUGAG | 6230 |
| 2639 | CAACUGGU G UGUGCAGA | 2454 | UCUCCACA GCCGAAAGGCGAGUGAGGUCU ACCAGUUG | 6231 |
| 2641 | ACUGGUGU G UGCAGAUC | 2455 | GAUCUCCA GCCGAAAGGCGAGUGAGGUCU ACACCAGU | 6232 |
| 2643 | UGGUGUGU G CAGAUCGC | 2456 | GCGAUCUG GCCGAAAGGCGAGUGAGGUCU ACACACCA | 6233 |
| 2650 | UCCAGAUC G CAAAGGGC | 2457 | GCCCUUUG GCCGAAAGGCGAGUGAGGUCU GAUCUGCA | 6234 |
| 2657 | CGCAAAGG G CAUGAACU | 2458 | AGUUCAUG GCCGAAAGGCGAGUGAGGUCU CCUUUGCG | 6235 |
| 2678 | GGAGGACC G UCGCUUGG | 2459 | CCAAGCGA GCCGAAAGGCGAGUGAGGUCU GGUCCUCC | 6236 |
| 2681 | GGACCGUC G CUUGGUGC | 2460 | GCACCAAG GCCGAAAGGCGAGUGAGGUCU GACGGUCC | 6237 |
| 2686 | GUCGCUUG G UGCACCGC | 2461 | GCGGUGCA GCCGAAAGGCGAGUGAGGUCU CAAGCGAC | 6238 |
| 2688 | CGCUUGGU G CACCGCGA | 2462 | UCGCGGUG GCCGAAAGGCGAGUGAGGUCU ACCAAGCG | 6239 |
| 2693 | GGUGCACC G CGACCUGG | 2463 | CCAGGUCG GCCGAAAGGCGAGUGAGGUCU GGUGCACC | 6240 |
| 2701 | GCGACCUG G CAGCCAGG | 2464 | CCUGGCUG GCCGAAAGGCGAGUGAGGUCU CAGGUCGC | 6241 |
| 2704 | ACCUGGCA G CCAGGAAC | 2465 | GUUCCUGG GCCGAAAGGCGAGUGAGGUCU UGCCAGGU | 6242 |
| 2713 | CCAGGAAC G UACUGGUG | 2466 | CACCAGUA GCCGAAAGGCGAGUGAGGUCU GUUCCUGG | 6243 |
| 2719 | ACGUACUG G UGAAAACA | 2467 | UGUUUUCA GCCGAAAGGCGAGUGAGGUCU CAGUACGU | 6244 |
| 2730 | AAAACACC G CAGCAUGU | 2468 | ACAUGCUG GCCGAAAGGCGAGUGAGGUCU GGUGUUUU | 6245 |
| 2733 | ACACCGCA G CAUGUCAA | 2469 | UUGACAUG GCCGAAAGGCGAGUGAGGUCU UGCGGUGU | 6246 |
| 2737 | CGCAGCAU G UCAAGAUC | 2470 | GAUCUUGA GCCGAAAGGCGAGUGAGGUCU AUGCUGCG | 6247 |
| 2757 | GAUUUUGG G CUGGCCAA | 2471 | UUGGCCAG GCCGAAAGGCGAGUGAGGUCU CCAAAAUC | 6248 |
| 2761 | UUGGGCUG G CCAAACUG | 2472 | CAGUUUGG GCCGAAAGGCGAGUGAGGUCU CAGCCCAA | 6249 |
| 2769 | GCCAAACU G CUGGGUGC | 2473 | GCACCCAG GCCGAAAGGCGAGUGAGGUCU AGUUUGGC | 6250 |
| 2774 | ACUGCUGG G UGCGGAAG | 2474 | CUUCCGCA GCCGAAAGGCGAGUGAGGUCU CCAGCAGU | 6251 |
| 2776 | UGCUGGGU G CGGAAGAG | 2475 | CUCUUCCG GCCGAAAGGCGAGUGAGGUCU ACCCAGCA | 6252 |
| 2797 | AAUACCAU G CAGAAGGA | 2476 | UCCUUCUG GCCGAAAGGCGAGUGAGGUCU AUGGUAUU | 6253 |
| 2807 | AGAAGGAG G CAAAGUGC | 2477 | GCACUUUG GCCGAAAGGCGAGUGAGGUCU CUCCUUCU | 6254 |
| 2812 | GAGGCAAA G UGCCUAUC | 2478 | GAUAGGCA GCCGAAAGGCGAGUGAGGUCU UUUGCCUC | 6255 |
| 2814 | GGCAAAGU G CCUAUCAA | 2479 | UUGAUAGG GCCGAAAGGCGAGUGAGGUCU ACUUUGCC | 6256 |
| 2823 | CCUAUCAA G UGGAUGGC | 2480 | GCCAUCCA GCCGAAAGGCGAGUGAGGUCU UUGAUAGG | 6257 |
| 2830 | AGUGGAUG G CAUUGGAA | 2481 | UUCCAAUG GCCGAAAGGCGAGUGAGGUCU CAUCCACU | 6258 |
| 2870 | CCACCAGA G UGAUGUCU | 2482 | AGACAUCA GCCGAAAGGCGAGUGAGGUCU UCUGGUGG | 6259 |
| 2875 | AGAGUGAU G UCUGGAGC | 2483 | GCUCCAGA GCCGAAAGGCGAGUGAGGUCU AUCACUCU | 6260 |
| 2882 | UGUCUGGA G CUACGGGG | 2484 | CCCCGUAG GCCGAAAGGCGAGUGAGGUCU UCCAGACA | 6261 |
| 2890 | GCUACGGG G UGACCGUU | 2485 | AACGGUCA GCCGAAAGGCGAGUGAGGUCU CCCGUAGC | 6262 |
| 2896 | GGGUGACC G UUUGGGAG | 2486 | CUCCCAAA GCCGAAAGGCGAGUGAGGUCU GGUCACCC | 6263 |
| 2904 | GUUUGGGA G UUGAUGAC | 2487 | GUCAUCAA GCCGAAAGGCGAGUGAGGUCU UCCCAAAC | 6264 |
| 2925 | GGAUCCAA G CCAUAUGA | 2488 | UCAUAUGG GCCGAAAGGCGAGUGAGGUCU UUGGAUCC | 6265 |
| 2944 | GAAUCCCU G CCAGCGAG | 2489 | CUCGCUGG GCCGAAAGGCGAGUGAGGUCU AGGGAUUC | 6266 |
| 2948 | CCCUGCCA G CGAGAUCU | 2490 | AGAUCUCG GCCGAAAGGCGAGUGAGGUCU UGGCAGGG | 6267 |
| 2981 | AGGAGAAC G CCUCCCUC | 2491 | GAGGGAGG GCCGAAAGGCGAGUGAGGUCU GUUCUCCU | 6268 |
| 2991 | CUCCCUCA G CCACCCAU | 2492 | AUGGGUGG GCCGAAAGGCGAGUGAGGUCU UGAGGGAG | 6269 |
| 3002 | ACCCAUAU G UACCAUCG | 2493 | CGAUGGUA GCCGAAAGGCGAGUGAGGUCU AUAUGGGU | 6270 |
| 3013 | CCAUCGAU G UCUACAUG | 2494 | CAUGUAGA GCCGAAAGGCGAGUGAGGUCU AUCGAUGG | 6271 |
| 3028 | UGAUCAUG G UCAAGUGC | 2495 | GCACUUGA GCCGAAAGGCGAGUGAGGUCU CAUGAUCA | 6272 |
| 3033 | AUGGUCAA G UGCUGGAU | 2496 | AUCCAGCA GCCGAAAGGCGAGUGAGGUCU UUGACCAU | 6273 |
| 3035 | GGUCAAGU G CUGGAUGA | 2497 | UCAUCCAG GCCGAAAGGCGAGUGAGGUCU ACUUGACC | 6274 |
| 3049 | UGAUAGAC G CAGAUAGU | 2498 | ACUAUCUG GCCGAAAGGCGAGUGAGGUCU GUCUAUCA | 6275 |
| 3056 | CGCAGAUA G UCGCCCAA | 2499 | UUGGGCGA GCCGAAAGGCGAGUGAGGUCU UAUCUGCG | 6276 |
| 3059 | AGAUAGUC G CCCAAAGU | 2500 | ACUUUGGG GCCGAAAGGCGAGUGAGGUCU GACUAUCU | 6277 |
| 3066 | CGCCCAAA G UUCCGUGA | 2501 | UCACGGAA GCCGAAAGGCGAGUGAGGUCU UUUGGGCG | 6278 |
| 3071 | AAAGUUCC G UGAGUUGA | 2502 | UCAACUCA GCCGAAAGGCGAGUGAGGUCU GGAACUUU | 6279 |
| 3075 | UUCCGUGA G UUGAUCAU | 2503 | AUGAUCAA GCCGAAAGGCGAGUGAGGUCU UCACGGAA | 6280 |
| 3100 | CCAAAAUG G CCCGAGAC | 2504 | GUCUCGGG GCCGAAAGGCGAGUGAGGUCU CAUUUUGG | 6281 |
| 3114 | GACCCCCA G CGCUACCU | 2505 | AGGUAGCG GCCGAAAGGCGAGUGAGGUCU UGGGGGUC | 6282 |
| 3116 | CCCCCAGC G CUACCUUG | 2506 | CAAGGUAG GCCGAAAGGCGAGUGAGGUCU GCUGGGGG | 6283 |
| 3124 | GCUACCUU G UCAUUCAG | 2507 | CUGAAUGA GCCGAAAGGCGAGUGAGGUCU AAGGUAGC | 6284 |
| 3147 | GAAAGAAU G CAUUUGCC | 2508 | GGCAAAUG GCCGAAAGGCGAGUGAGGUCU AUUCUUUC | 6285 |
| 3153 | AUGCAUUU G CCAAGUCC | 2509 | GGACUUGG GCCGAAAGGCGAGUGAGGUCU AAAUGCAU | 6286 |
| 3158 | UUUGCCAA G UCCUACAG | 2510 | CUGUAGGA GCCGAAAGGCGAGUGAGGUCU UUGGCAAA | 6287 |
| 3182 | CUUCUACC G UGCCCUGA | 2511 | UCAGGGCA GCCGAAAGGCGAGUGAGGUCU GGUAGAAG | 6288 |
| 3184 | UCUACCGU G CCCUGAUG | 2512 | CAUCAGGG GCCGAAAGGCGAGUGAGGUCU ACGGUAGA | 6289 |
| 3214 | UGGACGAC G UGGUGGAU | 2513 | AUCCACCA GCCGAAAGGCGAGUGAGGUCU GUCGUCCA | 6290 |
| 3217 | ACGACGUG G UGGAUGCC | 2514 | GGCAUCCA GCCGAAAGGCGAGUGAGGUCU CACGUCGU | 6291 |
| 3223 | UGGUGGAU G CCGACGAG | 2515 | CUCGUCGG GCCGAAAGGCGAGUGAGGUCU AUCCACCA | 6292 |
| 3231 | GCCGACGA G UACCUCAU | 2516 | AUGAGGUA GCCGAAAGGCGAGUGAGGUCU UCGUCGGC | 6293 |
| 3246 | AUCCCACA G CAGGGCUU | 2517 | AAGCCCUG GCCGAAAGGCGAGUGAGGUCU UGUGGGAU | 6294 |
| 3251 | ACAGCAGG G CUUCUUCA | 2518 | UGAAGAAG GCCGAAAGGCGAGUGAGGUCU CCUGCUGU | 6295 |
| 3260 | CUUCUUCA G CAGCCCCU | 2519 | AGGGGCUG GCCGAAAGGCGAGUGAGGUCU UGAAGAAG | 6296 |
| 3263 | CUUCAGCA G CCCCUCCA | 2520 | UGGAGGGG GCCGAAAGGCGAGUGAGGUCU UGCUGAAG | 6297 |
| 3273 | CCCUCCAC G UCACGGAC | 2521 | GUCCGUGA GCCGAAAGGCGAGUGAGGUCU GUGGAGGG | 6298 |
| 3293 | CCUCCUGA G CUCUCUGA | 2522 | UCAGAGAG GCCGAAAGGCGAGUGAGGUCU UCAGGAGG | 6299 |
| 3302 | CUCUCUGA G UGCAACCA | 2523 | UGGUUGCA GCCGAAAGGCGAGUGAGGUCU UCAGAGAG | 6300 |
| 3304 | CUCUGAGU G CAACCAGC | 2524 | GUUGGUUG GCCGAAAGGCGAGUGAGGUCU ACUCAGAG | 6301 |
| 3311 | UGCAACCA G CAACAAUU | 2525 | AAUUGUUG GCCGAAAGGCGAGUGAGGUCU UGGUUGCA | 6302 |
| 3325 | AUUCCACC G UGGCUUGC | 2526 | GCAAGCCA GCCGAAAGGCGAGUGAGGUCU GGUGGAAU | 6303 |
| 3328 | CCACCGUG G CUUGCAUU | 2527 | AAUGCAAG GCCGAAAGGCGAGUGAGGUCU CACGGUGG | 6304 |
| 3332 | CGUGGCUU G CAUUGAUA | 2528 | UAUCAAUG GCCGAAAGGCGAGUGAGGUCU AAGCCACG | 6305 |
| 3348 | AGAAAUGG G CUGCAAAG | 2529 | CUUUGCAG GCCGAAAGGCGAGUGAGGUCU CCAUUUCU | 6306 |
| 3351 | AAUGGGCU G CAAAGCUG | 2530 | CAGCUUUG GCCGAAAGGCGAGUGAGGUCU AGCCCAUU | 6307 |
| 3356 | GCUGCAAA G CUGUCCCA | 2531 | UGGGACAG GCCGAAAGGCGAGUGAGGUCU UUUGCAGC | 6308 |
| 3359 | GCAAAGCU G UCCCAUCA | 2532 | UGAUGGGA GCCGAAAGGCGAGUGAGGUCU AGCUUUGC | 6309 |
| 3377 | CGAAGACA G CUUCUUGC | 2533 | GCAAGAAG GCCGAAAGGCCACUGAGGUCU UGUCUUCC | 6310 |
| 3384 | AGCUUUCU G CAGCGAUA | 2534 | UAUCGCUG GCCGAAAGGCGAGUGAGGUCU AAGAAGCU | 6311 |
| 3387 | UUCUUGCA G CGAUACAG | 2535 | CUGUAUCG GCCGAAAGGCGAGUGAGGUCU UGCAAGAA | 6312 |
| 3395 | GCGAUACA G CUCAGACC | 2536 | GGUCUGAG GCCGAAAGGCGAGUGAGGUCU UGUAUCGC | 6313 |
| 3410 | CCCCACAG G CGCCUUGA | 2537 | UCAAGGCG GCCGAAAGGCGAGUGAGGUCU CUGUGGGG | 6314 |
| 3412 | CCACAGGC G CCUUGACU | 2538 | AGUCAAGG GCCGAAAGGCGAGUGAGGUCU GCCUGUGG | 6315 |
| 3428 | UGAGGACA G CAUAGACG | 2539 | CGUCUAUG GCCGAAAGGCGAGUGAGGUCU UGUCCUCA | 6316 |
| 3451 | UCCUCCCA G UGCCUGAA | 2540 | UUCAGGCA GCCGAAAGGCGAGUGAGGUCU UGGGAGGA | 6317 |
| 3453 | CUCCCAGU G CCUGAAUA | 2541 | UAUUCAGG GCCGAAAGGCGAGUGAGGUCU ACUGGGAG | 6318 |
| 3471 | AUAAACCA G UCCGUUCC | 2542 | GGAACGGA GCCGAAAGGCGAGUGAGGUCU UGGUUUAU | 6319 |
| 3475 | ACCAGUCC G UUCCCAAA | 2543 | UUUGGGAA GCCGAAAGGCGAGUGAGGUCU GGACUGGU | 6320 |
| 3486 | CCCAAAAG G CCCGCUGG | 2544 | CCAGCGGG GCCGAAAGGCGAGUGAGGUCU CUUUUGGG | 6321 |
| 3490 | AAAGGCCC G CUGGCUCU | 2545 | AGAGCCAG GCCGAAAGGCGAGUGAGGUCU GGGCCUUU | 6322 |
| 3494 | GCCCGCUG G CUCUGUGC | 2546 | GCACAGAG GCCGAAAGGCGAGUGAGGUCU CAGCGGGC | 6323 |
| 3499 | CUCGCUCU G UGCAGAAU | 2547 | AUUCUGCA GCCGAAAGGCGAGUGAGGUCU AGAGCCAG | 6324 |
| 3501 | GCCUCUGU G CAGAAUCC | 2548 | GGAUUCUG GCCCAAAGCCGAGUGAGGUCU ACAGAGCC | 6325 |
| 3511 | AGAAUCCU G UCUAUCAC | 2549 | GUGAUAGA GCCGAAAGGCGAGUGAGGUCU AGCAUUCU | 6326 |
| 3525 | CACAAUCA G CCUCUGAA | 2550 | UUCACAGC CCCGAAACGCGACUGAGGUCU UGAUUGUC | 6327 |
| 3538 | UGAACCCC G CGCCCAGC | 2551 | GCUGCGCC GCCGAAAGGCGAGUGAGGUCU CCGCUUCA | 6328 |
| 3540 | AACCCCGC G CCCACCAC | 2552 | CUCCUCGG GCCGAAAGCCCACUCAGGUCU GCGGCCUU | 6329 |
| 3545 | CGCGCCCA G CAGAGACC | 2553 | CGUCUCUC GCCGAAACGCCAGUCAGGUCU UGGGCGCC | 6330 |
| 3575 | CCCCCACA G CACUCCAC | 2554 | CUCCAGUC GCCGAAAGGCGAGUCAGGUCU UGUGGGGC | 6331 |
| 3580 | ACAGCACU G CACUCCCC | 2555 | GCCCACUC GCCGAAACGCCAGUGAGGUCU ACUCCUCU | 6332 |
| 3583 | GCACUGCA G UGGCCAAC | 2556 | GUUGCCCA GCCGAAAGGCGAGUCAGGUCU UCCACUCC | 6333 |
| 3587 | UCCAGUGC G CAACCCCG | 2557 | CGGCGUUC GCCGAAAGGCGAGUGAGGUCU CCACUGCA | 6334 |
| 3597 | AACCCCGA G UAUCUCAA | 2558 | UUGACAUA GCCGAAAGGCGACUGAGGUCU UCGGCCUU | 6335 |
| 3610 | UCAACACU G UCCAGCCC | 2559 | CGCCUGGA GCCCAAAGCCGAGUGAGGUCU AGUGUUGA | 6336 |
| 3615 | ACUGUCCA G CCCACCUG | 2560 | CACCUGGG GCCGAAAGGCGAGUGAGGUCU UGCACACU | 6337 |
| 3623 | GCCCACCU G UGUCAACA | 2561 | UCUUCACA GCCCAAAGCCGAGUCAGGUCU ACGUCGCC | 6338 |
| 3625 | CCACCUGU G UCAACACC | 2562 | CCUGUUCA GCCCAAAGCCGAGUCAGGUCU ACAGCUCC | 6339 |
| 3632 | UGUCAACA G CACAUUCG | 2563 | CGAAUGUC GCCCAAACGCGAGUGAGGUCU UGUUGACA | 6340 |
| 3644 | AUUCCACA G CCCUGCCC | 2564 | GCGCAGGG GCCCAAAGCCCACUGAGGUCU UGUCGAAU | 6341 |
| 3649 | ACAGCCCU G CCCACUGG | 2565 | CCAGUCGC GCCGAAAGGCGACUGAGGUCU ACCGCUCU | 6342 |
| 3658 | CCCACUCG G CCCAGAAA | 2566 | UUUCUGCG GCCGAAAGGCGAGUCAGGUCU CCACUGCG | 6343 |
| 3668 | CCACAAAC G CACCCACC | 2567 | CCUCCCUC GCCCAAACCCCACUGAGGUCU CUUUCUCC | 6344 |
| 3671 | CAAACCCA G CCACCAAA | 2568 | UUUCCUCC GCCCAAACCCCACUCAGGUCU UCCCUUUC | 6345 |
| 3683 | CCAAAUUA G CCUCCACA | 2569 | UCUCCACC GCCCAAACCCCACUCAGGUCU UAAUUUCC | 6346 |
| 3705 | CACUACCA G CAGCACUU | 2570 | AACUCCUC GCCCAAACCCCACUCAGGUCU UCCUACUC | 6347 |
| 3727 | CCAACCAA G CCAACCCA | 2571 | UCCCUUCC GCCCAAACCCCACUCAGGUCU UUCCUUCC | 6348 |
| 3732 | CAACCCAA G CCAAAUCC | 2572 | CCAUUUCC GCCCAAACCCCACUCAGGUCU UUCCCUUC | 6349 |
| 3740 | CCCAAAUC G CAUCUUUA | 2573 | UAAACAUC GCCCAAACCCCACUCAGGUCU CAUUUGGC | 6350 |
| 3752 | CUUUAAGG G CUCCACAG | 2574 | CUGUGGAG GCCGAAAGGCGAGUGAGGUCU CCUUAAAG | 6351 |
| 3760 | GCUCCACA G CUGAAAAU | 2575 | AUUUUCAG GCCGAAAGGCGAGUGAGGUCU UGUGGAGC | 6352 |
| 3769 | CUGAAAAU G CAGAAUAC | 2576 | GUAUUCUG GCCGAAAGGCGAGUGAGGUCU AUUUUCAG | 6353 |
| 3784 | ACCUAAGG G UCGCGCCA | 2577 | UGGCGCGA GCCGAAAGGCGAGUGAGGUCU CCUUAGGU | 6354 |
| 3787 | UAAGGGUC G CGCCACAA | 2578 | UUGUGGCG GCCGAAAGGCGAGUGAGGUCU GACCCUUA | 6355 |
| 3789 | AGGGUCGC G CCACAAAG | 2579 | CUUUGUGG GCCGAAAGGCGAGUGAGGUCU GCGACCCU | 6356 |
| 3797 | GCCACAAA G CAGUGAAU | 2580 | AUUCACUG GCCGAAAGGCGAGUGAGGUCU UUUGUGGC | 6357 |
| 3800 | ACAAAGCA G UGAAUUUA | 2581 | UAAAUUCA GCCGAAAGGCGAGUGAGGUCU UGCUUUGU | 6358 |
| 3814 | UUAUUGGA G CAUGACCA | 2582 | UGGUCAUG GCCGAAAGGCGAGUGAGGUCU UCCAAUAA | 6359 |
| 3832 | GGAGGAUA G UAUGAGCC | 2583 | GGCUCAUA GCCGAAAGGCGAGUGAGGUCU UAUCCUCC | 6360 |
| 3838 | UAGUAUGA G CCCUAAAA | 2584 | UUUUAGGG GCCGAAAGGCGAGUGAGGUCU UCAUACUA | 6361 |
| 3876 | AGGACCAA G CCACAGCA | 2585 | UGCUGUGG GCCGAAAGGCGAGUGAGGUCU UUGGUCCU | 6362 |
| 3882 | AAGCCACA G CAGGUCCU | 2586 | AGGACCUG GCCGAAAGGCGAGUGAGGUCU UGUGGCUU | 6363 |
| 3886 | CACAGCAG G UCCUCCAU | 2587 | AUGGAGGA GCCGAAAGGCGAGUGAGGUCU CUGCUGUG | 6364 |
| 3902 | UCCCAACA G CCAUGCCC | 2588 | GGGCAUGG GCCGAAAGGCGAGUGAGGUCU UGUUGGGA | 6365 |
| 3907 | ACAGCCAU G CCCGCAUU | 2589 | AAUGCGGG GCCGAAAGGCGAGUGAGGUCU AUGGCUGU | 6366 |
| 3911 | CCAUGCCC G CAUUAGCU | 2590 | AGCUAAUG GCCGAAAGGCGAGUGAGGUCU GGGCAUGG | 6367 |
| 3917 | CCGCAUUA G CUCUUAGA | 2591 | UCUAAGAG GCCGAAAGGCGAGUGAGGUCU UAAUGCGG | 6368 |
| 3937 | ACAGACUG G UUUUGCAA | 2592 | UUGCAAAA GCCGAAAGGCGAGUGAGGUCU CAGUCUGU | 6369 |
| 3942 | CUGGUUUU G CAACGUUU | 2593 | AAACGUUG GCCGAAAGGCGAGUGAGGUCU AAAACCAG | 6370 |
| 3947 | UUUGCAAC G UUUACACC | 2594 | GGUGUAAA GCCGAAAGGCGAGUGAGGUCU GUUGCAAA | 6371 |
| 3961 | ACCGACUA G CCAGGAAG | 2595 | CUUCCUGG GCCGAAAGGCGAGUGAGGUCU UAGUCGGU | 6372 |
| 3969 | GCCAGGAA G UACUUCCA | 2596 | UGGAAGUA GCCGAAAGGCGAGUGAGGUCU UUCCUGGC | 6373 |
| 3984 | CACCUCGG G CACAUUUU | 2597 | AAAAUGUG GCCGAAAGGCGAGUGAGGUCU CCGAGGUG | 6374 |
| 3998 | UUUGGGAA G UUGCAUUC | 2598 | GAAUGCAA GCCGAAAGGCGAGUGAGGUCU UUCCCAAA | 6375 |
| 4001 | GGGAAGUU G CAUUCCUU | 2599 | AAGGAAUG GCCGAAAGGCGAGUGAGGUCU AACUUCCC | 6376 |
| 4011 | AUUCCUUU G UCUUCAAA | 2600 | UUUGAAGA GCCGAAAGGCGAGUGAGGUCU AAAGGAAU | 6377 |
| 4022 | UUCAAACU G UGAAGCAU | 2601 | AUGCUUCA GCCGAAAGGCGAGUGAGGUCU AGUUUGAA | 6378 |
| 4027 | ACUGUGAA G CAUUUACA | 2602 | UGUAAAUG GCCGAAAGGCGAGUGAGGUCU UUCACAGU | 6379 |
| 4041 | ACAGAAAC G CAUCCAGC | 2603 | GCUGGAUG GCCGAAAGGCGAGUGAGGUCU GUUUCUGU | 6380 |
| 4048 | CGCAUCCA G CAAGAAUA | 2604 | UAUUCUUG GCCGAAAGGCGAGUGAGGUCU UGGAUGCG | 6381 |
| 4059 | AGAAUAUU G UCCCUUUG | 2605 | CAAAGGGA GCCGAAAGGCGAGUGAGGUCU AAUAUUCU | 6382 |
| 4069 | CCCUUUGA G CAGAAAUU | 2606 | AAUUUCUG GCCGAAAGGCGAGUGAGGUCU UCAAAGGG | 6383 |
| 4092 | UCAAAGAG G UAUAUUUG | 2607 | CAAAUAUA GCCGAAAGGCGAGUGAGGUCU CUCUUUGA | 6384 |
| 4116 | AAAAAAAA G UAUAUGUG | 2608 | CACAUAUA GCCGAAAGGCGAGUGAGGUCU UUUUUUUU | 6385 |
| 4122 | AAGUAUAU G UGAGGAUU | 2609 | AAUCCUCA GCCGAAAGGCGAGUGAGGUCU AUAUACUU | 6386 |
| 4153 | AUCUUGGA G UUUUUCAU | 2610 | AUGAAAAA GCCGAAAGGCGAGUGAGGUCU UCCAAGAU | 6387 |
| 4163 | UUUUCAUU G UCGCUAUU | 2611 | AAUAGCGA GCCGAAAGGCGAGUGAGGUCU AAUGAAAA | 6388 |
| 4166 | UCAUUGUC G CUAUUGAU | 2612 | AUCAAUAG GCCGAAAGGCGAGUGAGGUCU GACAAUGA | 6389 |
| 4189 | UUCAAUGG G CUCUUCCA | 2613 | UCCAACAC GCCCAAAGGCCACUCAGGUCU CCAUUGAA | 6390 |
| 4209 | AGGAAGAA G CUUGCUGG | 2614 | CCAGCAAG GCCGAAAGGCGAGUGAGGUCU UUCUUCCU | 6391 |
| 4213 | AGAAGCUU G CUGGUAGC | 2615 | GCUACCAG GCCGAAAGGCGAGUGAGGUCU AAGCUUCU | 6392 |
| 4217 | GCUUGCUG G UAGCACUU | 2616 | AAGUGCUA GCCGAAAGGCGAGUGAGGUCU CAGCAAGC | 6393 |
| 4220 | UCCUCGUA G CACUUGCU | 2617 | AGCAAGUG GCCGAAAGGCGAGUGAGGUCU UACCAGCA | 6394 |
| 4226 | UAGCACUU G CUACCCUG | 2618 | CAGGGUAG GCCGAAAGGCGAGUGAGGUCU AAGUGCUA | 6395 |
| 4236 | UACCCUCA G UUCAUCCA | 2619 | UCGAUGAA GCCGAAAGCCGAGUGAGGUCU UCAGGGUA | 6396 |
| 4246 | UCAUCCAC G CCCAACUC | 2620 | CAGUUGGG GCCGAAAGGCGAGUGAGGUCU CUGGAUGA | 6397 |
| 4254 | GCCCAACU G UGAGCAAG | 2621 | CUUGCUCA GCCGAAAGGCGAGUGAGGUCU AGUUGGGC | 6398 |
| 4258 | AACUGUGA G CAAGGAGC | 2622 | GCUCCUUG GCCGAAAGGCGAGUGAGGUCU UCACAGUU | 6399 |
| 4265 | AGCAAGGA G CACAAGCC | 2623 | GGCUUCUG GCCGAAAGGCGAGUGAGGUCU UCCUUGCU | 6400 |
| 4271 | GAGCACAA G CCACAAGU | 2624 | ACUUGUGG GCCGAAAGGCGAGUCAGGUCU UUGUGCUC | 6401 |
| 4278 | AGCCACAA G UCUUCCAG | 2625 | CUGGAAGA GCCGAAAGGCGAGUGAGGUCU UUGUGGCU | 6402 |
| 4292 | CAGAGGAU G CUUGAUUC | 2626 | GAAUCAAG GCCGAAAGGCGAGUGAGGUCU AUCCUCUG | 6403 |
| 4303 | UGAUUCCA G UGGUUCUG | 2627 | CAGAACCA GCCGAAAGGCGAGUGAGGUCU UGGAAUCA | 6404 |
| 4306 | UUCCAGUG G UUCUGCUU | 2628 | AAGCAGAA GCCGAAAGGCGAGUGAGGUCU CACUGGAA | 6405 |
| 4311 | GUGGUUCU G CUUCAAGG | 2629 | CCUUGAAG GCCGAAAGGCGAGUGAGGUCU AGAACCAC | 6406 |
| 4319 | GCUUCAAG G CUUCCACU | 2630 | AGUGGAAG GCCGAAAGGCGAGUGAGGUCU CUUGAAGC | 6407 |
| 4328 | CUUCCACU G CAAAACAC | 2631 | GUGUUUUG GCCGAAAGGCGAGUGAGGUCU AGUGGAAG | 6408 |
| 4352 | CCAAGAAG G CCUUCAUG | 2632 | CAUGAAGG GCCGAAAGGCGAGUGAGGUCU CUUCUUGG | 6409 |
| 4361 | CCUUCAUG G CCCCAGCA | 2633 | UGCUGGGG GCCGAAAGGCGAGUGAGGUCU CAUGAAGG | 6410 |
| 4367 | UGGCCCCA G CAGGCCGG | 2634 | CCGGCCUG GCCGAAAGGCGAGUGAGGUCU UGGGGCCA | 6411 |
| 4371 | CCCAGCAG G CCGGAUCG | 2635 | CGAUCCGG GCCGAAAGGCGAGUGAGGUCU CUGCUGGG | 6412 |
| 4380 | CCGGAUCG G UACUGUAU | 2636 | AUACAGUA GCCGAAAGGCGAGUGAGGUCU CGAUCCGG | 6413 |
| 4385 | UCGGUACU G UAUCAAGU | 2637 | ACUUGAUA GCCGAAAGGCGAGUGAGGUCU AGUACCGA | 6414 |
| 4392 | UGUAUCAA G UCAUGGCA | 2638 | UGCCAUGA GCCGAAAGGCGAGUGAGGUCU UUGAUACA | 6415 |
| 4398 | AAGUCAUG G CAGGUACA | 2639 | UGUACCUG GCCGAAAGGCGAGUGAGGUCU CAUGACUU | 6416 |
| 4402 | CAUGGCAG G UACAGUAG | 2640 | CUACUGUA GCCGAAAGGCGAGUGAGGUCU CUGCCAUG | 6417 |
| 4407 | CAGGUACA G UAGGAUAA | 2641 | UUAUCCUA GCCGAAAGGCGAGUGAGGUCU UGUACCUG | 6418 |
| 4416 | UAGGAUAA G CCACUCUG | 2642 | CAGAGUGG GCCGAAAGGCGAGUGAGGUCU UUAUCCUA | 6419 |
| 4424 | GCCACUCU G UCCCUUCC | 2643 | GGAAGGGA GCCGAAAGGCGAGUGAGGUCU AGAGUGGC | 6420 |
| 4436 | CUEUCUGG G CAAAGAAG | 2644 | CUUCUUUG GCCGAAAGGCGAGUGAGGUCU CCAGGAAG | 6421 |
| 4482 | UUACUUUU G UAAAAAUG | 2645 | CAUUUUUA GCCGAAAGGCGAGUGAGGUCU AAAAGUAA | 6422 |
| 4490 | GUAAAAAU G UCCCCACG | 2646 | CGUGGGGA GCCGAAAGGCGAGUGAGGUCU AUUUUUAC | 6423 |
| 4499 | UCCCCACG G UACUUACU | 2647 | AGUAAGUA GCCGAAAGGCGAGUGAGGUCU CGUGGGGA | 6424 |
| 4524 | AUGGACCA G UGGUUUCC | 2648 | GGAAACCA GCCGAAAGGCGAGUGAGGUCU UGGUCCAU | 6425 |
| 4527 | GACCAGUG G UUUCCAGU | 2649 | ACUGGAAA GCCGAAAGGCGAGUGAGGUCU CACUGGUC | 6426 |
| 4534 | GGUUUCCA G UCAUGAGC | 2650 | GCUCAUGA GCCGAAAGGCGAGUGAGGUCU UGGAAACC | 6427 |
| 4541 | AGUCAUGA G CGUUAGAC | 2651 | GUCUAACG GCCGAAAGGCGAGUGAGGUCU UCAUGACU | 6428 |
| 4543 | UCAUGAGC G UUAGACUG | 2652 | CAGUCUAA GCCGAAAGGCGAGUGAGGUCU GCUCAUGA | 6429 |
| 4556 | ACUGACUU G UUUGUCUU | 2653 | AAGACAAA GCCGAAAGGCGAGUGAGGUCU AAGUCAGU | 6430 |
| 4560 | ACUUGUUU G UCUUCCAU | 2654 | AUGGAAGA GCCGAAAGGCGAGUGAGGUCU AAACAAGU | 6431 |
| 4575 | AUUCCAUU G UUUUGAAA | 2655 | UUUCAAAA GCCGAAAGGCGAGUGAGGUCU AAUGGAAU | 6432 |
| 4588 | GAAACUCA G UAUGCCGC | 2656 | GCGGCAUA GCCGAAAGGCGAGUGAGGUCU UGAGUUUC | 6433 |
| 4592 | CUCAGUAU G CCGCCCCU | 2657 | AGGGGCGG GCCGAAAGGCGAGUGAGGUCU AUACUGAG | 6434 |
| 4595 | AGUAUGCC G CCCCUGUC | 2658 | GACAGGGG GCCGAAAGGCGAGUGAGGUCU GGCAUACU | 6435 |
| 4601 | CCGCCCCU G UCUUGCUG | 2659 | CAGCAAGA GCCGAAAGGCGAGUGAGGUCU AGGGGCGG | 6436 |
| 4606 | CCUGUCUU G CUGUCAUG | 2660 | CAUGACAG GCCGAAAGGCGAGUGAGGUCU AAGACAGG | 6437 |
| 4609 | GUCUUGCU G UCAUGAAA | 2661 | UUUCAUGA GCCGAAAGGCGAGUGAGGUCU AGCAAGAC | 6438 |
| 4621 | UGAAAUCA G CAAGAGAG | 2662 | CUCUCUUG GCCGAAAGGCGAGUGAGGUCU UGAUUUCA | 6439 |
| 4661 | GGAUUCCA G CCCACAUU | 2663 | AAUGUGGG GCCGAAAGGCGAGUGAGGUCU UGGAAUCC | 6440 |
| 4680 | AUUCAUCA G CAUUUGGA | 2664 | UCCAAAUG GCCGAAAGGCGAGUGAGGUCU UGAUGAAU | 6441 |
| 4695 | GACCAAUA G CCCACAGC | 2665 | GCUGUGGG GCCGAAAGGCGAGUGAGGUCU UAUUGGUC | 6442 |
| 4702 | AGCCCACA G CUGAGAAU | 2666 | AUUCUCAG GCCGAAAGGCGAGUGAGGUCU UGUGGGCU | 6443 |
| 4711 | CUGAGAAU G UGGAAUAC | 2667 | GUAUUCCA GCCGAAAGGCGAGUGAGGUCU AUUCUCAG | 6444 |
| 4734 | AUAACACC G CUUUUGUU | 2668 | AACAAAAG GCCGAAAGGCGAGUGAGGUCU GGUGUUAU | 6445 |
| 4740 | CCGCUUUU G UUCUCGCA | 2669 | UGCGAGAA GCCGAAAGGCGAGUGAGGUCU AAAAGCGG | 6446 |
| 4748 | UUGUUCUC G CAAAAACG | 2670 | CGUUUUUG GCCGAAAGGCGAGUGAGGUCU GAGAACAA | 6447 |
| 4754 | GCAAAAAC G UAUCUCCU | 2671 | AGGAGAUA GCCGAAAGGCGAGUGAGGUCU GUUUUUGC | 6448 |
| 4771 | AAUUUGAG G CUCAGAUG | 2672 | CAUCUGAG GCCGAAAGGCGAGUGAGGUCU CUCAAAUU | 6449 |
| 4784 | GAUGAAAU G CAUCAGGU | 2673 | ACCUGAUG GCCGAAAGGCGAGUGAGGUCU AUUUCAUC | 6450 |
| 4791 | UGCAUCAG G UCCUUUGG | 2674 | CCAAAGGA GCCGAAAGGCGAGUGAGGUCU CUGAUGCA | 6451 |
| 4801 | CCUUUGGG G CAUAGAUC | 2675 | GAUCUAUG GCCGAAAGGCGAGUGAGGUCU CCCAAAGG | 6452 |
| 4829 | AAAAUGAA G CUGCUCUG | 2676 | CAGAGCAG GCCGAAAGGCGAGUGAGGUCU UUCAUUUU | 6453 |
| 4832 | AUGAAGCU G CUCUGAAA | 2677 | UUUCAGAG GCCGAAAGGCGAGUGAGGUCU AGCUUCAU | 6454 |
| 4850 | CUCCUUUA G CCAUCACC | 2678 | GGUGAUGG GCCGAAAGGCGAGUGAGGUCU UAAAGGAG | 6455 |
| 4876 | CAAAAUUA G UUUGUGUU | 2679 | AACACAAA GCCGAAAGGCGAGUGAGGUCU UAAUUUUG | 6456 |
| 4880 | AUUAGUUU G UGUUACUU | 2680 | AAGUAACA GCCGAAAGGCGAGUGAGGUCU AAACUAAU | 6457 |
| 4882 | UAGUUUGU G UUACUUAU | 2681 | AUAAGUAA GCCGAAAGGCGAGUGAGGUCU ACAAACUA | 6458 |
| 4899 | GGAAGAUA G UUUUCUCC | 2682 | GGAGAAAA GCCGAAAGGCGAGUGAGGUCU UAUCUUCC | 6459 |
| 4926 | CUUCAAAA G CUUUUUAC | 2683 | GUAAAAAG GCCGAAAGGCGAGUGAGGUCU UUUUGAAG | 6460 |
| 4942 | CUCAAAGA G UAUAUGUU | 2684 | AACAUAUA GCCGAAAGGCGAGUGAGGUCU UCUUUGAG | 6461 |
| 4948 | GAGUAUAU G UUCCCUCC | 2685 | GGAGGGAA GCCGAAAGGCGAGUGAGGUCU AUAUACUC | 6462 |
| 4959 | CCCUCCAG G UCAGCUGC | 2686 | GCAGCUGA GCCGAAAGGCGAGUGAGGUCU CUGGAGGG | 6463 |
| 4963 | CCAGGUCA G CUGCCCCC | 2687 | GGGGGCAG GCCGAAAGGCGAGUGAGGUCU UGACCUGG | 6464 |
| 4966 | GGUCAGCU G CCCCCAAA | 2688 | UUUGGGGG GCCGAAAGGCGAGUGAGGUCU AGCUGACC | 6465 |
| 4987 | CUCCUUAC G CUUUGUCA | 2689 | UGACAAAG GCCGAAAGGCGAGUGAGGUCU GUAAGGAG | 6466 |
| 4992 | UACGCUUU G UCACACAA | 2690 | UUGUGUGA GCCGAAAGGCGAGUGAGGUCU AAAGCGUA | 6467 |
| 5004 | CACAAAAA G UGUCUCUG | 2691 | CAGAGACA GCCGAAAGGCGAGUGAGGUCU UUUUUGUG | 6468 |
| 5006 | CAAAAAGU G UCUCUGCC | 2692 | GGCAGAGA GCCGAAAGGCGAGUGAGGUCU ACUUUUUG | 6469 |
| 5012 | GUGUCUCU G CCUUGAGU | 2693 | ACUCAAGG GCCGAAAGGCGAGUGAGGUCU AGAGACAC | 6470 |
| 5019 | UGCCUUGA G UCAUCUAU | 2694 | AUAGAUGA GCCGAAAGGCGAGUGAGGUCU UCAAGGCA | 6471 |
| 5032 | CUAUUCAA G CACUUACA | 2695 | UGUAAGUG GCCGAAAGGCGAGUGAGGUCU UUGAAUAG | 6472 |
| 5041 | CACUUACA G CUCUGGCC | 2696 | GGCCAGAG GCCGAAAGGCGAGUGAGGUCU UGUAAGUG | 6473 |
| 5047 | CAGCUCUG G CCACAACA | 2697 | UGUUGUGG GCCGAAAGGCGAGUGAGGUCU CAGAGCUG | 6474 |
| 5058 | ACAACAGG G CAUUUUAC | 2698 | GUAAAAUG GCCGAAAGGCGAGUGAGGUCU CCUGUUGU | 6475 |
| 5069 | UUUUACAG G UGCGAAUG | 2699 | CAUUCGCA GCCGAAAGGCGAGUGAGGUCU CUGUAAAA | 6476 |
| 5071 | UUACAGGU G CGAAUGAC | 2700 | GUCAUUCG GCCGAAAGGCGAGUGAGGUCU ACCUGUAA | 6477 |
| 5081 | GAAUGACA G UAGCAUUA | 2701 | UAAUGCUA GCCGAAAGGCGAGUGAGGUCU UGUCAUUC | 6478 |
| 5084 | UGACAGUA G CAUUAUGA | 2702 | UCAUAAUG GCCGAAAGGCGAGUGAGGUCU UACUGUCA | 6479 |
| 5093 | CAUUAUGA G UAGUGUGA | 2703 | UCACACUA GCCGAAAGGCGAGUGAGGUCU UCAUAAUG | 6480 |
| 5096 | UAUGAGUA G UGUGAAUU | 2704 | AAUUCACA GCCGAAAGGCGAGUGAGGUCU UACUCAUA | 6481 |
| 5098 | UGAGUAGU G UGAAUUCA | 2705 | UGAAUUCA GCCGAAAGGCGAGUGAGGUCU ACUACUCA | 6482 |
| 5108 | GAAUUCAG G UAGUAAAU | 2706 | AUUUACUA GCCGAAAGGCGAGUGAGGUCU CUGAAUUC | 6483 |
| 5111 | UUCAGGUA G UAAAUAUG | 2707 | CAUAUUUA GCCGAAAGGCGAGUGAGGUCU UACCUGAA | 6484 |
| 5128 | AAACUAGG G UUUGAAAU | 2708 | AUUUCAAA GCCGAAAGGCGAGUGAGGUCU CCUAGUUU | 6485 |
| 5144 | UUGAUAAU G CUUUCACA | 2709 | UGUGAAAG GCCGAAAGGCGAGUGAGGUCU AUUAUCAA | 6486 |
| 5159 | CAACAUUU G CAGAUGUU | 2710 | AACAUCUG GCCGAAAGGCGAGUGAGGUCU AAAUGUUG | 6487 |
| 5165 | UUGCAGAU G UUUUAGAA | 2711 | UUCUAAAA GCCGAAAGGCGAGUGAGGUCU AUCUGCAA | 6488 |
| 5182 | GGAAAAAA G UUCCUUCC | 2712 | GGAAGGAA GCCGAAAGGCGAGUGAGGUCU UUUUUUCC | 6489 |
| 5230 | AAGAUUCA G CUAGUUAG | 2713 | CUAACUAG GCCGAAAGGCGAGUGAGGUCU UGAAUCUU | 6490 |
| 5234 | UUCAGCUA G UUAGGAGC | 2714 | GCUCCUAA GCCGAAAGGCGAGUGAGGUCU UAGCUGAA | 6491 |
| 5241 | AGUUAGGA G CCCAUUUU | 2715 | AAAAUGGG GCCGAAAGGCGAGUGAGGUCU UCCUAACU | 6492 |
| 5260 | CCUAAUCU G UGUGUGCC | 2716 | GGCACACA GCCGAAAGGCGAGUGAGGUCU AGAUUAGG | 6493 |
| 5262 | UAAUCUGU G UGUGCCCU | 2717 | AGGGCACA GCCGAAAGGCGAGUGAGGUCU ACAGAUGA | 6494 |
| 5264 | AUCUGUGU G UGCCCUGU | 2718 | ACAGGGCA GCCGAAAGGCGAGUGAGGUCU ACACAGAU | 6495 |
| 5266 | CUGUGUGU G CCCUGUAA | 2719 | UUACAGGG GCCGAAAGGCGAGUGAGGUCU ACACACAG | 6496 |
| 5271 | UGUGCCCU G UAACCUGA | 2720 | UCAGGUUA GCCGAAAGGCGAGUGAGGUCU AGGGCACA | 6497 |
| 5283 | CCUGACUG G UUAACAGC | 2721 | GCUGUUAA GCCGAAAGGCGAGUGAGGUCU CAGUCAGG | 6498 |
| 5290 | GGUUAACA G CAGUCCUU | 2722 | AAGGACUG GCCGAAAGGCGAGUGAGGUCU UGUUAACC | 6499 |
| 5293 | UAACAGCA G UCCUUUGU | 2723 | ACAAAGGA GCCGAAAGGCGAGUGAGGUCU UCCUGUUA | 6500 |
| 5300 | AGUCCUUU G UAAACAGU | 2724 | ACUGUUUA GCCGAAAGGCGAGUGAGGUCU AAAGGACU | 6501 |
| 5307 | UGUAAACA G UGUUUUAA | 2725 | UUAAAACA GCCGAAAGGCGAGUGAGGUCU UGUUUACA | 6502 |
| 5309 | UAAACAGU G UUUUAAAC | 2726 | GUUUAAAA GCCGAAAGGCGAGUGAGGUCU ACUGUUUA | 6503 |
| 5325 | CUCUCCUA G UCAAUAUC | 2727 | GAUAUUGA GCCGAAAGGCGAGUGAGGUCU UAGGAGAG | 6504 |
| 5364 | AAGAAAUG G UUCAGAAA | 2728 | UUUCUGAA GCCGAAAGGCGAGUGAGGUCU CAUUUCUU | 6505 |
| 5382 | UAUUUUCA G CCUACAGU | 2729 | ACUGUAGG GCCGAAAGGCGAGUGAGGUCU UGAAAAUA | 6506 |
| 5389 | AGCCUACA G UUAUGUUC | 2730 | GAACAUAA GCCGAAAGGCGAGUGAGGUCU UGUAGGCU | 6507 |
| 5394 | ACAGUUAU G UUCAGUCA | 2731 | UGACUGAA GCCGAAAGGCGAGUGAGGUCU AUAACUGU | 6508 |
| 5399 | UAUGUUCA G UCACACAC | 2732 | GUGUGUGA GCCGAAAGGCGAGUGAGGUCU UGAACAUA | 6509 |
| 5419 | UACAAAAU G UUCCUUUU | 2733 | AAAAGGAA GCCGAAAGGCGAGUGAGGUCU AUUUUGUA | 6510 |
| 5428 | UUCCUUUU G CUUUUAAA | 2734 | UUUAAAAG GCCGAAAGGCGAGUGAGGUCU AAAAGGAA | 6511 |
| 5437 | CUUUUAAA G UAAUUUUU | 2735 | AAAAAUUA GCCGAAAGGCGAGUGAGGUCU UUUAAAAG | 6512 |
| 5459 | CCAGAUCA G UCAGAGCC | 2736 | GGCUCUGA GCCGAAAGGCGAGUGAGGUCU UGAUCUGG | 6513 |
| 5465 | CAGUCAGA G CCCCUACA | 2737 | UGUAGGGG GCCGAAAGGCGAGUGAGGUCU UCUGACUG | 6514 |
| 5474 | CCCCUACA G CAUUGUUA | 2738 | UAACAAUG GCCGAAAGGCGAGUGAGGUCU UGUAGGGG | 6515 |
| 5479 | ACAGCAUU G UUAAGAAA | 2739 | UUUCUUAA GCCGAAAGGCGAGUGAGGUCU AAUGCUGU | 6516 |
| 5488 | UUAAGAAA G UAUUUGAU | 2740 | AUCAAAUA GCCGAAAGGCGAGUGAGGUCU UUUCUUAA | 6517 |
| 5501 | UGAUUUUU G UCUCAAUG | 2741 | CAUUGAGA GCCGAAAGGCGAGUGAGGUCU AAAAAUCA | 6518 |

Input Sequence = N_005228.1. Cut Site = G/Y
Arm Length = 8. Core Sequence = GCcgaaagGCGaGuCaaGGuCu
NM_005228.1 (Homo sapiens epidermal growth tactor receptor (avian erythroblastic leukemia viral (v-erb-b) oncogene homolog) (EGFR), mPNA)

[0223] TABLE VI
Human EGFR Receptor DNAzyme and Substrate Sequence

| Pos | Substrate | Seq ID | DNAzyme | Seq ID |
|---|---|---|---|---|
| 9 | GCCGCGCU G CGCCGGAG | 2118 | CTCCGGCG GGCTAGCTACAACGA AGCGCGGC | 6519 |
| 11 | CGCGCUGC G CCGGAGUC | 2119 | GACTCCGG GGCTAGCTACAACGA GCAGCGCG | 6520 |
| 17 | GCGCCGGA G UCCCGAGC | 2120 | GCTCGGGA GGCTAGCTACAACGA TCCGGCGC | 6521 |
| 24 | AGUCCCGA G CUAGCCCC | 2121 | GGGGCTAG GGCTAGCTACAACGA TCGGGACT | 6522 |
| 28 | CCGAGCUA G CCCCGGCG | 2122 | CGCCGGGG GGCTAGCTACAACGA TAGCTCGG | 6523 |
| 34 | UAGCCCCG G CGCCGCCG | 2123 | CGGCGGCG GGCTAGCTACAACGA CGGGGCTA | 6524 |
| 36 | GCCCCGGC G CCGCCGCC | 2124 | GGCGGCGG GGCTAGCTACAACGA GCCGGGCC | 6525 |
| 39 | CCGGCGCC G CCGCCGCC | 2125 | GGCGGCGG GGCTAGCTACAACGA GGCGCCGG | 6526 |
| 42 | GCGCCGCC G CCGCCCAG | 2126 | CTGGGCGG GGCTAGCTACAACGA GGCGGCGC | 6527 |
| 45 | CCGCCGCC G CCCAGACC | 2127 | GGTCTGGG GGCTAGCTACAACGA GGCGGCGG | 6528 |
| 51 | CCGCCCAG G CCGGACGA | 2742 | TCGTCCGG GGCTAGCTACAACGA CTGGGCGG | 6529 |
| 56 | CAGACCGG G CGACAGGC | 2743 | GCCTGTCG GGCTAGCTACAACGA CCGGTCTG | 6530 |
| 59 | ACCGGACG G CAGGCCAC | 2744 | GTGGCCTG GGCTAGCTACAACGA CGTCCGGT | 6531 |
| 63 | GACGACAG G CCACCUCG | 2128 | CGAGGTGG GGCTAGCTACAACGA CTGTCGTC | 6532 |
| 66 | GACAGGCC G CCUCGUCG | 840 | CGACGAGG GGCTAGCTACAACGA GGCCTGTC | 6533 |
| 71 | GCCACCUC G UCGGCGUC | 2129 | GACGCCGA GGCTAGCTACAACGA GAGGTGGC | 6534 |
| 75 | CCUCGUCG G CGUCCGCC | 2130 | GGCGGACG GGCTAGCTACAACGA CGACGAGG | 6535 |
| 77 | UCGUCGGC G UCCGCCCG | 2131 | CGGGCGGA GGCTAGCTACAACGA GCCGACGA | 6536 |
| 81 | CGGCGUCC G CCCGAGUC | 2132 | GACTCGGG GGCTAGCTACAACGA GGACGCCG | 6537 |
| 87 | CCGCCCGA G UCCCCGCC | 2133 | GGCGGGGA GGCTAGCTACAACGA TCGGGCGG | 6538 |
| 93 | GAGUCCCC G CCUCGCCG | 2134 | CGGCGAGG GGCTAGCTACAACGA GGGGACTC | 6539 |
| 98 | CCCGCCUC G CCGCCAAC | 2135 | GTTGGCGG GGCTAGCTACAACGA GAGGCGGG | 6540 |
| 101 | GCCUCGCC G CCAACGCC | 2136 | GGCGTTGG GGCTAGCTACAACGA GGCGAGGC | 6541 |
| 105 | CGCCGCCA G CGCCACAA | 2745 | TTGTGGCG GGCTAGCTACAACGA TGGCGGCG | 6542 |
| 107 | CCGCCAAC G CCACAACC | 2137 | GGTTGTGG GGCTAGCTACAACGA GTTGGCGG | 6543 |
| 110 | CCAACGCC G CAACCACC | 855 | GGTGGTTG GGCTAGCTACAACGA GGCGTTGG | 6544 |
| 113 | ACGCCACA G CCACCGCG | 2746 | CGCGGTGG GGCTAGCTACAACGA TGTGGCGT | 6545 |
| 116 | CCACAACC G CCGCGCAC | 858 | GTGCGCGG GGCTAGCTACAACGA GGTTGTGG | 6546 |
| 119 | CAACCACC G CGCACGGC | 2138 | GCCGTGCG GGCTAGCTACAACGA GGTGGTTG | 6547 |
| 121 | ACCACCGC G CACGGCCC | 2139 | GGGCCGTG GGCTAGCTACAACGA GCGGTGGT | 6548 |
| 123 | CACCGCGC G CGGCCCCC | 860 | GGGGGCCG GGCTAGCTACAACGA GCGCGGTG | 6549 |
| 126 | CGCGCACG G CCCCCUGA | 2140 | TCAGGGGG GGCTAGCTACAACGA CGTGCGCG | 6550 |
| 134 | GCCCCCUG G CUCCGUCC | 2747 | GGACGGAG GGCTAGCTACAACGA CAGGGGGC | 6551 |
| 139 | CUGACUCC G UCCAGUAU | 2141 | ATACTGGA GGCTAGCTACAACGA GCAGTCAC | 6552 |
| 144 | UCCGUCCA G UAUUGAUC | 2142 | GATCAATA GGCTAGCTACAACGA TGGACGGA | 6553 |
| 146 | CGUCCAGU G UUGAUCGG | 10 | CCGATCAA GGCTAGCTACAACGA ACTGGACG | 6554 |
| 150 | CAGUAUUG G UCGGGAGA | 2748 | TCTCCCGA GGCTAGCTACAACGA CAATACTG | 6555 |
| 159 | UCGGGAGA G CCGGAGCG | 2143 | CGCTCCGG GGCTAGCTACAACGA TCTCCCGA | 6556 |
| 165 | GAGCCGGA G CGAGCUCU | 2144 | AGAGCTCG GGCTAGCTACAACGA TCCGGCTC | 6557 |
| 169 | CGGAGCGA G CUCUUCGG | 2145 | CCGAAGAG GGCTAGCTACAACGA TCGCTCCG | 6558 |
| 181 | UUCGGGGA G CAGCGAUG | 2146 | CATCGCTG GGCTAGCTACAACGA TCCCCGAA | 6559 |
| 184 | GGGGAGCA G CGAUGCGA | 2147 | TCGCATCG GGCTAGCTACAACGA TGCTCCCC | 6560 |
| 187 | GAGCAGCG G UGCGACCC | 2749 | GGGTCGCA GGCTAGCTACAACGA CGCTGCTC | 6561 |
| 189 | GCAGCGAU G CCACCCUC | 2148 | GAGGGTCG GGCTAGCTACAACGA ATCGCTGC | 6562 |
| 192 | GCGAUGCG G CCCUCCGG | 2750 | CCGGAGGG GGCTAGCTACAACGA CGCATCGC | 6563 |
| 202 | CCUCCGGG G CGGCCGGG | 2751 | CCCGGCCG GGCTAGCTACAACGA CCCGGAGG | 6564 |
| 205 | CCGCGACG G CCGGGGCA | 2149 | TGCCCCGG GGCTAGCTACAACGA CGTCCCGG | 6565 |
| 211 | CGGCCGGG G CAGCGCUC | 2150 | GAGCGCTG GGCTAGCTACAACGA CCCGGCCG | 6566 |
| 214 | CCGGGGCA G CGCUCCUG | 2151 | CAGGAGCG GGCTAGCTACAACGA TGCCCCGG | 6567 |
| 216 | GGGGCAGC G CUCCUGGC | 2152 | GCCAGGAG GGCTAGCTACAACGA GCTGCCCC | 6568 |
| 223 | CGCUCCUG G CGCUGCUG | 2153 | CAGCAGCG GGCTAGCTACAACGA CAGGAGCG | 6569 |
| 225 | CUCCUGGC G CUGCUGGC | 2154 | GCCAGCAG GGCTAGCTACAACGA GCCAGGAG | 6570 |
| 228 | CUGGCGCU G CUGGCUGC | 2155 | GCAGCCAG GGCTAGCTACAACGA AGCGCCAG | 6571 |
| 232 | CGCUGCUG G CUGCGCUC | 2156 | GAGCGCAG GGCTAGCTACAACGA CAGCAGCG | 6572 |
| 235 | UGCUGGCU G CGCUCUGC | 2157 | GCAGAGCG GGCTAGCTACAACGA AGCCAGCA | 6573 |
| 237 | CUGGCUGC G CUCUGCCC | 2158 | GGGCAGAG GGCTAGCTACAACGA GCAGCCAG | 6574 |
| 242 | UGCGCUCU G CCCGGCGA | 2159 | TCGCCGGG GGCTAGCTACAACGA AGAGCGCA | 6575 |
| 247 | UCUGCCCG G CGAGUCGG | 2160 | CCGACTCG GGCTAGCTACAACGA CGGGCAGA | 6576 |
| 251 | CCCGGCGA G UCGGGCUC | 2161 | GAGCCCGA GGCTAGCTACAACGA TCGCCGGG | 6577 |
| 256 | CGAGUCGG G CUCUGGAG | 2162 | CTCCAGAG GGCTAGCTACAACGA CCGACTCG | 6578 |
| 274 | AAAAGAAA G UUUGCCAA | 2163 | TTGGCAAA GGCTAGCTACAACGA TTTCTTTT | 6579 |
| 278 | GAAAGUUU G CCAAGGCA | 2164 | TGCCTTGG GGCTAGCTACAACGA AAACTTTC | 6580 |
| 284 | UUGCCAAG G CACGAGUA | 2165 | TACTCGTG GGCTAGCTACAACGA CTTGGCAA | 6581 |
| 286 | GCCAAGGC G CGAGUAAC | 894 | GTTACTCG GGCTAGCTACAACGA GCCTTGGC | 6582 |
| 290 | AGGCACGA G UAACAAGC | 2166 | GCTTGTTA GGCTAGCTACAACGA TCGTGCCT | 6583 |
| 293 | CACGAGUA G CAAGCUCA | 2752 | TGAGCTTG GGCTAGCTACAACGA TACTCGTG | 6584 |
| 297 | AGUAACAA G CUCACGCA | 2167 | TGCGTGAG GGCTAGCTACAACGA TTGTTACT | 6585 |
| 301 | ACAAGCUC G CGCAGUUG | 897 | CAACTGCG GGCTAGCTACAACGA GAGCTTGT | 6586 |
| 303 | AAGCUCAC G CAGUUGGG | 216 | CCCAACTG GGCTAGCTACAACGA GTGAGCTT | 6587 |
| 306 | CUCACGCA G UUGGGCAC | 2169 | GTGCCCAA GGCTAGCTACAACGA TGCGTGAG | 6588 |
| 311 | GCAGUUGG G CACUUUUG | 2170 | CAAAAGTG GGCTAGCTACAACGA CCAACTGC | 6589 |
| 313 | AGUUGGGC G CUUUUGAA | 899 | TTCAAAAG GGCTAGCTACAACGA GCCCAACT | 6590 |
| 323 | UUUUGAAG G UCAUUUUC | 2753 | GAAAATGA GGCTAGCTACAACGA CTTCAAAA | 6591 |
| 326 | UGAAGAUC G UUUUCUCA | 901 | TGAGAAAA GGCTAGCTACAACGA GATCTTCA | 6592 |
| 335 | UUUUCUCA G CCUCCAGA | 2171 | TCTGGAGG GGCTAGCTACAACGA TGAGAAAA | 6593 |
| 346 | UCCAGAGG G UGUUCAAU | 2754 | ATTGAACA GGCTAGCTACAACGA CCTCTGGA | 6594 |
| 348 | CAGAGGAU G UUCAAUAA | 2172 | TTATTGAA GGCTAGCTACAACGA ATCCTCTG | 6595 |
| 353 | GAUGUUCA G UAACUGUG | 2755 | CACAGTTA GGCTAGCTACAACGA TGAACATC | 6596 |
| 356 | GUUCAAUA G CUGUGAGG | 2756 | CCTCACAG GGCTAGCTACAACGA TATTGAAC | 6597 |
| 359 | CAAUAACU G UGAGGUGO | 2173 | CCACCTCA GGCTAGCTACAACGA AGTTATTG | 6598 |
| 364 | ACUGUGAG G UGGUCCUU | 2174 | AAGGACCA GGCTAGCTACAACGA CTCACAGT | 6599 |
| 367 | GUGAGGUG G UCCUUGGG | 2175 | CCCAAGGA GGCTAGCTACAACGA CACCTCAC | 6600 |
| 377 | CCUUGGGA G UUUGGAAA | 2757 | TTTCCAAA GGCTAGCTACAACGA TCCCAAGG | 6601 |
| 385 | AUUUGGAA G UUACCUAU | 2758 | ATAGGTAA GGCTAGCTACAACGA TTCCAAAT | 6602 |
| 388 | UGGAAAUU G CCUAUGUG | 44 | CACATAGG GGCTAGCTACAACGA AATTTCCA | 6603 |
| 392 | AAUUACCU G UGUGCAGA | 45 | TCTGCACA GGCTAGCTACAACGA AGGTAATT | 6604 |
| 394 | UUACCUAU G UGCAGAGG | 2176 | CCTCTGCA GGCTAGCTACAACGA ATAGGTAA | 6605 |
| 396 | ACCUAUGU G CAGAGGAA | 2177 | TTCCTCTG GGCTAGCTACAACGA ACATAGGT | 6606 |
| 404 | GCAGAGGA G UUAUGAUC | 2759 | GATCATAA GGCTAGCTACAACGA TCCTCTGC | 6607 |
| 407 | GAGGAAUU G UGAUCUUU | 47 | AAAGATCA GGCTAGCTACAACGA AATTCCTC | 6608 |
| 410 | GAAUUAUG G UCUUUCCU | 2760 | AGGAAAGA GGCTAGCTACAACGA CATAATTC | 6609 |
| 427 | UCUUAAAG G CCAUCCAG | 2761 | CTGGATGG GGCTAGCTACAACGA CTTTAAGA | 6610 |
| 430 | UAAAGACC G UCCAGGAG | 920 | CTCCTGGA GGCTAGCTACAACGA GGTCTTTA | 6611 |
| 439 | UCCAGGAG G UGGCUGGU | 2178 | ACCAGCCA GGCTAGCTACAACGA CTCCTGGA | 6612 |
| 442 | AGGAGGUG G CUGGUUAU | 2179 | ATAACCAG GGCTAGCTACAACGA CACCTCCT | 6613 |
| 446 | GGUGGCUG G UUAUGUCC | 2180 | GGACATAA GGCTAGCTACAACGA CAGCCACC | 6614 |
| 449 | GGCUGGUU G UGUCCUCA | 58 | TGAGGACA GGCTAGCTACAACGA AACCAGCC | 6615 |
| 451 | CUGGUUAU G UCCUCAUU | 2181 | AATGAGGA GGCTAGCTACAACGA ATAACCAG | 6616 |
| 457 | AUGUCCUC G UUGCCCUC | 926 | GAGGGCAA GGCTAGCTACAACGA GAGGACAT | 6617 |
| 460 | UCCUCAUU G CCCUCAAC | 2182 | GTTGAGGG GGCTAGCTACAACGA AATGAGGA | 6618 |
| 467 | UGCCCUCA G CACAGUGG | 2762 | CCACTGTG GGCTAGCTACAACGA TGAGGGCA | 6619 |
| 469 | CCCUCAAC G CAGUGGAG | 931 | CTCCACTG GGCTAGCTACAACGA GTTGAGGG | 6620 |
| 472 | UCAACACA G UGGAGCGA | 2183 | TCGCTCCA GGCTAGCTACAACGA TGTGTTGA | 6621 |
| 477 | ACAGUGGA G CGAAUUCC | 2184 | GGAATTCG GGCTAGCTACAACGA TCCACTGT | 6622 |
| 481 | UGGAGCGA G UUCCUUUG | 2763 | CAAAGGAA GGCTAGCTACAACGA TCGCTCCA | 6623 |
| 494 | UUUGGAAA G CCUGCAGA | 2764 | TCTGCAGG GGCTAGCTACAACGA TTTCCAAA | 6624 |
| 498 | GAAAACCU G CAGAUCAU | 2183 | ATGATCTG GGCTAGCTACAACGA AGGTTTTC | 6625 |
| 502 | ACCUCCAG G UCAUCAGA | 2765 | TCTGATGA GGCTAGCTACAACGA CTGCAGGT | 6626 |
| 505 | UGCAGAUC G UCAGAGGA | 938 | TCCTCTGA GGCTAGCTACAACGA GATCTGCA | 6627 |
| 515 | CAGAGGAA G UAUGUACU | 2766 | AGTACATA GGCTAGCTACAACGA TTCCTCTG | 6628 |
| 517 | GAGGAAAU G UGUACUAC | 69 | GTAGTACA GGCTAGCTACAACGA ATTTCCTC | 6629 |
| 519 | GGAAAUAU G UACUACGA | 2186 | TCGTAGTA GGCTAGCTACAACGA ATATTTCC | 6630 |
| 521 | AAAUAUGU G CUACGAAA | 70 | TTTCGTAG GGCTAGCTACAACGA ACATATTT | 6631 |
| 524 | UAUGUACU G CGAAAAUU | 71 | AATTTTCG GGCTAGCTACAACGA AGTACATA | 6632 |
| 530 | CUACGAAA G UUCCUAUG | 2767 | CATAGGAA GGCTAGCTACAACGA TTTCGTAG | 6633 |
| 536 | AAAUCCCU G UGCCUUAG | 74 | CTAAGGCA GGCTAGCTACAACGA AGGAATTT | 6634 |
| 538 | AUUCCUAU G CCUUAGCA | 2187 | TGCTAAGG GGCTAGCTACAACGA ATAGGAAT | 6635 |
| 544 | AUGCCUUA G CAGUCUUA | 2188 | TAAGACTG GGCTAGCTACAACGA TAAGGCAT | 6636 |
| 547 | CCUUAGCA G UCUUAUCU | 2189 | AGATAAGA GGCTAGCTACAACGA TGCTAAGG | 6637 |
| 552 | GCAGUCUU G UCUAACUA | 79 | TAGTTAGA GGCTAGCTACAACGA AAGACTGC | 6638 |
| 557 | CUUAUCUA G CUAUGAUG | 2768 | CATCATAG GGCTAGCTACAACGA TAGATAAG | 6639 |
| 560 | AUCUAACU G UGAUGCAA | 82 | TTGCATCA GGCTAGCTACAACGA AGTTAGAT | 6640 |
| 563 | UAACUAUG G UGCAAAUA | 2769 | TATTTGCA GGCTAGCTACAACGA CATAGTTA | 6641 |
| 565 | ACUAUGAU G CAAAUAAA | 2190 | TTTATTTG GGCTAGCTACAACGA ATCATAGT | 6642 |
| 569 | UGAUGCAA G UAAAACCG | 2770 | CGGTTTTA GGCTAGCTACAACGA TTGCATCA | 6643 |
| 574 | CAAAUAAA G CCGGACUG | 2771 | CAGTCCGG GGCTAGCTACAACGA TTTATTTG | 6644 |
| 579 | AAAACCGG G CUGAAGGA | 2772 | TCCTTCAG GGCTAGCTACAACGA CCGGTTTT | 6645 |
| 588 | CUGAAGGA G CUGCCCAU | 2191 | ATGGGCAG GGCTAGCTACAACGA TCCTTCAG | 6646 |
| 591 | AAGGAGCU G CCCAUGAG | 2192 | CTCATGGG GGCTAGCTACAACGA AGCTCCTT | 6647 |
| 595 | AGCUGCCC G UGAGAAAU | 955 | ATTTCTCA GGCTAGCTACAACGA GGGCAGCT | 6648 |
| 602 | CAUGAGAA G UUUACAGG | 2773 | CCTGTAAA GGCTAGCTACAACGA TTCTCATG | 6649 |
| 606 | AGAAAUUU G CAGGAAAU | 86 | ATTTCCTG GGCTAGCTACAACGA AAATTTCT | 6650 |
| 613 | UACAGGAA G UCCUGCAU | 2774 | ATGCAGGA GGCTAGCTACAACGA TTCCTGTA | 6651 |
| 618 | GAAAUCCU G CAUGGCGC | 2193 | GCGCCATG GGCTAGCTACAACGA AGGATTTC | 6652 |
| 620 | AAUCCUGC G UGGCGCCG | 959 | CGGCGCCA GGCTAGCTACAACGA GCAGGATT | 6653 |
| 623 | CCUGCAUG G CGCCGUGC | 2194 | GCACGGCG GGCTAGCTACAACGA CATGCAGG | 6654 |
| 625 | UGCAUGGC G CCGUGCGG | 2195 | CCGCACGG GGCTAGCTACAACGA GCCATGCA | 6655 |
| 628 | AUGGCGCC G UGCGGUUC | 2196 | GAACCGCA GGCTAGCTACAACGA GGCGCCAT | 6656 |
| 630 | GGCGCCGU G CGCUUCAG | 2197 | CTGAACCG GGCTAGCTACAACGA ACGGCGCC | 6657 |
| 633 | GCCGUGCG G UUCAGCAA | 2198 | TTGCTGAA GGCTAGCTACAACGA CGCACGGC | 6658 |
| 638 | GCGGUUCA G CAACAACC | 2199 | GGTTGTTG GCCTAGCTACAACGA TGAACCGC | 6659 |
| 641 | GUUCAGCA G CAACCCUG | 2775 | CAGGGTTG GGCTAGCTACAACGA TGCTGAAC | 6660 |
| 644 | CAGCAACA G CCCUGCCC | 2776 | GGGCAGGG GGCTAGCTACAACGA TGTTGCTG | 6661 |
| 649 | ACAACCCU G CCCUGUGC | 2200 | GCACAGGG GGCTAGCTACAACGA AGGGTTGT | 6662 |
| 654 | CCUGCCCU G UGCAACGU | 2201 | ACGTTGCA GGCTAGCTACAACGA AGGGCAGG | 6663 |
| 656 | UGCCCUGU G CAACGUGG | 2202 | CCACGTTG GGCTAGCTACAACGA ACAGGGCA | 6664 |
| 659 | CCUGUGCA G CGUGGAGA | 2777 | TCTCCACG GGCTAGCTACAACGA TGCACAGG | 6665 |
| 661 | UGUGCAAC G UGGAGAGC | 2203 | GCTCTCCA GGCTAGCTACAACGA GTTGCACA | 6666 |
| 668 | CGUGGAGA G CAUCCAGU | 2204 | ACTGGATG GGCTAGCTACAACGA TCTCCACG | 6667 |
| 670 | UGGAGAGC G UCCAGUGG | 971 | CCACTGGA GGCTAGCTACAACGA GCTCTCCA | 6668 |
| 675 | AGCAUCCA G UGGCGGGA | 2205 | TCCCGCCAGGCTAGCTACAACGA TGGATGCT6669 | |
| 678 | AUCCAGUG G CGGGACAU | 2206 | ATGTCCCGGGCTAGCTACAACGA CACTGGAT6670 | |
| 683 | GUGGCGGG G CAUAGUCA | 2778 | TGACTATGGGCTAGCTACAACGA CCCGCCAC6671 | |
| 685 | GGCGGGAC G UAGUCAGC | 974 | GCTGACTAGGCTAGCTACAACGA GTCCCGCC6672 | |
| 688 | GGGACAUA G UCAGCAGU | 2207 | ACTGCTGAGGCTAGCTACAACGA TATGTCCC6673 | |
| 692 | CAUAGUCA G CAGUGACU | 2208 | AGTCACTG GGCTAGCTACAACGA TGACTATG | 6674 |
| 695 | AGUCAGCA G UGACUUUC | 2209 | GAAAGTCA GGCTAGCTACAACGA TGCTGACT | 6675 |
| 698 | CAGCAGUG G CUUUCUCA | 2779 | TGAGAAAG GGCTAGCTACAACGA CACTGCTG | 6676 |
| 707 | CUUUCUCA G CAACAUGU | 2210 | ACATGTTG GGCTAGCTACAACGA TGAGAAAG | 6677 |
| 710 | UCUCAGCA G CAUGUCGA | 2780 | TCGACATG GGCTAGCTACAACGA TGCTGAGA | 6678 |
| 712 | UCAGCAAC G UGUCGAUG | 981 | CATCGACA GGCTAGCTACAACGA GTTGCTGA | 6679 |
| 714 | AGCAACAU G UCGAUGGA | 2211 | TCCATCGA GGCTAGCTACAACGA ATGTTGCT | 6680 |
| 718 | ACAUGUCG G UGGACUUC | 2781 | GAAGTCCA GGCTAGCTACAACGA CGACATGT | 6681 |
| 722 | GUCGAUGG G CUUCCAGA | 2782 | TCTGGAAG GGCTAGCTACAACGA CCATCGAC | 6682 |
| 731 | CUUCCAGA G CCACCUGG | 2783 | CCAGGTGG GGCTAGCTACAACGA TCTGGAAG | 6683 |
| 734 | CCAGAACC G CCUGGGCA | 986 | TGCCCAGG GGCTAGCTACAACGA GGTTCTGG | 6684 |
| 740 | CCACCUGG G CAGCUGCC | 2212 | GGCAGCTG GGCTAGCTACAACGA CCAGGTGG | 6685 |
| 743 | CCUGGGCA G CUGCCAAA | 2213 | TTTGGCAG GGCTAGCTACAACGA TGCCCAGG | 6686 |
| 746 | GGGCAGCU G CCAAAAGU | 2214 | ACTTTTGG GGCTAGCTACAACGA AGCTGCCC | 6687 |
| 753 | UGCCAAAA G UGUGAUCC | 2215 | GGATCACA GGCTAGCTACAACGA TTTTGGCA | 6688 |
| 755 | CCAAAAGU G UGAUCCAA | 2216 | TTGGATCA GGCTAGCTACAACGA ACTTTTGG | 6689 |
| 758 | AAAGUGUG G UCCAAGCU | 2784 | AGCTTGGA GGCTAGCTACAACGA CACACTTT | 6690 |
| 764 | UGAUCCAA G CUGUCCCA | 2217 | TGGGACAG GGCTAGCTACAACGA TTGGATCA | 6691 |
| 767 | UCCAAGCU G UCCCAAUG | 2218 | CATTGGGA GGCTAGCTACAACGA AGCTTGGA | 6692 |
| 773 | CUGUCCCA G UGGGAGCU | 2785 | AGCTCCCA GGCTAGCTACAACGA TGGGACAG | 6693 |
| 779 | CAAUGGGA G CUGCUGGG | 2219 | CCCAGCAG GGCTAGCTACAACGA TCCCATTG | 6694 |
| 782 | UGGGAGCU G CUGGGGUG | 2220 | CACCCCAG GGCTAGCTACAACGA AGCTCCCA | 6695 |
| 788 | CUGCUGGG G UGCAGGAG | 2221 | CTCCTGCA GGCTAGCTACAACGA CCCAGCAG | 6696 |
| 790 | GCUGGGGU G CAGGAGAG | 2222 | CTCTCCTG GGCTAGCTACAACGA ACCCCAGC | 6697 |
| 803 | AGAGGAGA G CUGCCAGA | 2786 | TCTGGCAG GGCTAGCTACAACGA TCTCCTCT | 6698 |
| 806 | GGAGAACU G CCAGAAAC | 2223 | GTTTCTGG GGCTAGCTACAACGA AGTTCTCC | 6699 |
| 813 | UGCCAGAA G CUGACCAA | 2787 | TTGGTCAG GGCTAGCTACAACGA TTCTGGCA | 6700 |
| 817 | AGAAACUG G CCAAAAUC | 2788 | GATTTTGG GGCTAGCTACAACGA CAGTTTCT | 6701 |
| 823 | UGACCAAA G UCAUCUGU | 2789 | ACAGATGA GGCTAGCTACAACGA TTTGGTCA | 6702 |
| 826 | CCAAAAUC G UCUGUGCC | 1008 | GGCACAGA GGCTAGCTACAACGA GATTTTGG | 6703 |
| 830 | AAUCAUCU G UGCCCAGC | 2224 | GCTGGGCA GGCTAGCTACAACGA AGATGATT | 6704 |
| 832 | UCAUCUGU G CCCAGCAG | 2225 | CTGCTGGG GGCTAGCTACAACGA ACAGATGA | 6705 |
| 837 | UGUGCCCA G CAGUGCUC | 2226 | GAGCACTG GGCTAGCTACAACGA TGGGCACA | 6706 |
| 840 | GCCCAGCA G UGCUCCGG | 2227 | CCGGAGCA GGCTAGCTACAACGA TGCTGGGC | 6707 |
| 842 | CCAGCAGU G CUCCGGGC | 2228 | GCCCGGAG GGCTAGCTACAACGA ACTGCTGG | 6708 |
| 849 | UGCUCCGG G CGCUGCCG | 2229 | CGGCAGCG GGCTAGCTACAACGA CCGGAGCA | 6709 |
| 851 | CUCCGGGC G CUGCCGUG | 2230 | CACGGCAG GGCTAGCTACAACGA GCCCGGAG | 6710 |
| 854 | CGGGCGCU G CCGUGGCA | 2231 | TGCCACGG GGCTAGCTACAACGA AGCGCCCG | 6711 |
| 857 | GCGCUGCC G UGGCAAGU | 2232 | ACTTGCCA GGCTAGCTACAACGA GGCAGCGC | 6712 |
| 860 | CUGCCGUG G CAAGUCCC | 2233 | GGGACTTG GGCTAGCTACAACGA CACGGCAG | 6713 |
| 864 | CGUGGCAA G UCCCCCAG | 2234 | CTGGGGGA GGCTAGCTACAACGA TTGCCACG | 6714 |
| 872 | GUCCCCCA G UGACUGCU | 2235 | AGCAGTCA GGCTAGCTACAACGA TGGGGGAC | 6715 |
| 875 | CCCCAGUG G CUGCUGCC | 2790 | GGCAGCAG GGCTAGCTACAACGA CACTGGGG | 6716 |
| 878 | CAGUGACU G CUGCCACA | 2236 | TGTGGCAG GGCTAGCTACAACGA AGTCACTG | 6717 |
| 881 | UGACUGCU G CCACAACC | 2237 | GGTTGTGG GGCTAGCTACAACGA AGCAGTCA | 6718 |
| 884 | CUGCUGCC G CAACCAGU | 1027 | ACTGGTTG GGCTAGCTACAACGA GGCAGCAG | 6719 |
| 887 | CUGCCACA G CCAGUGUG | 2791 | CACACTGG GGCTAGCTACAACGA TGTGGCAG | 6720 |
| 891 | CACAACCA G UCUCCUGC | 2238 | GCAGCACA GGCTAGCTACAACGA TGGTTGTG | 6721 |
| 893 | CAACCAGU G UGCUGCAG | 2239 | CTGCAGCA GGCTAGCTACAACGA ACTGGTTG | 6722 |
| 895 | ACCAGUGU G CUGCAGGC | 2240 | GCCTGCAG GGCTAGCTACAACGA ACACTGGT | 6723 |
| 898 | AGUGUGCU G CAGGCUGC | 2241 | GCAGCCTG GGCTAGCTACAACGA AGCACACT | 6724 |
| 902 | UGCUGCAG G CUGCACAG | 2242 | CTGTGCAG GGCTAGCTACAACGA CTGCAGCA | 6725 |
| 905 | UGCAGGCU G CACAGGCC | 2243 | GGCCTGTG GGCTAGCTACAACGA AGCCTGCA | 6726 |
| 907 | CAGGCUGC G CAGGCCCC | 1034 | GGGCCCTG GGCTAGCTACAACGA GCAGCCTG | 6727 |
| 911 | CUGCACAG G CCCCCGGG | 2244 | CCCGGGGG GGCTAGCTACAACGA CTGTGCAG | 6728 |
| 923 | CCGGGAGA G CGACUGCC | 2245 | GGCAGTCG GGCTAGCTACAACGA TCTCCCGG | 6729 |
| 926 | GGAGAGCG G CUGCCUGG | 2792 | CCAGGCAG GGCTAGCTACAACGA CGCTCTCC | 6730 |
| 929 | GAGCGACU G CCUGGUCU | 2246 | AGACCAGG GGCTAGCTACAACGA AGTCGCTC | 6731 |
| 934 | ACUGCCUG G UCUGCCGC | 2247 | GCGGCAGA GGCTAGCTACAACGA CAGGCAGT | 6732 |
| 938 | CCUGGUCU G CCGCAAAU | 2248 | ATTTGCGG GGCTAGCTACAACGA AGACCAGG | 6733 |
| 941 | GGUCUGCC G CAAAUUCC | 2249 | GGAATTTG GGCTAGCTACAACGA GGCAGACC | 6734 |
| 945 | UGCCGCAA G UUCCGAGA | 2793 | TCTCGGAA GGCTAGCTACAACGA TTGCGGCA | 6735 |
| 953 | AUUCCGAG G CGAAGCCA | 2794 | TGGCTTCG GGCTAGCTACAACGA CTCGGAAT | 6736 |
| 958 | GAGACGAA G CCACGUGC | 2250 | GCACGTGG GGCTAGCTACAACGA TTCGTCTC | 6737 |
| 961 | ACGAAGCC G CGUGCAAG | 1048 | CTTGCACG GGCTAGCTACAACGA GGCTTCGT | 6738 |
| 963 | GAAGCCAC G UGCAAGGA | 2251 | TCCTTGCA GGCTAGCTACAACGA GTGGCTTC | 6739 |
| 965 | AGCCACGU G CAAGGACA | 2252 | TGTCCTTG GGCTAGCTACAACGA ACGTGGCT | 6740 |
| 971 | GUGCAAGG G CACCUGCC | 2795 | GGCAGGTG GGCTAGCTACAACGA CCTTGCAC | 6741 |
| 973 | GCAAGGAC G CCUGCCCC | 1050 | GGGGCAGG GGCTAGCTACAACGA GTCCTTGC | 6742 |
| 977 | GGACACCU G CCCCCCAC | 2253 | GTGGGGGG GGCTAGCTACAACGA AGGTGTCC | 6743 |
| 984 | UGCCCCCC G CUCAUGCU | 1058 | AGCATGAG GGCTAGCTACAACGA GGGGGGCA | 6744 |
| 988 | CCCCACUC G UGCUCUAC | 1060 | GTAGAGCA GGCTAGCTACAACGA GAGTGGGG | 6745 |
| 990 | CCACUCAU G CUCUACAA | 2254 | TTGTAGAG GGCTAGCTACAACGA ATGAGTGG | 6746 |
| 995 | CAUGCUCU G CAACCCCA | 111 | TGGGGTTG GGCTAGCTACAACGA AGAGCATG | 6747 |
| 998 | GCUCUACA G CCCCACCA | 2796 | TGGTGGGG GGCTAGCTACAACGA TGTAGAGC | 6748 |
| 1003 | ACAACCCC G CCACGUAC | 1067 | GTACGTGG GGCTAGCTACAACGA GGGGTTGT | 6749 |
| 1006 | ACCCCACC G CGUACCAG | 1069 | CTGGTACG GGCTAGCTACAACGA GGTGGGGT | 6750 |
| 1008 | CCCACCAC G UACCAGAU | 2255 | ATCTGGTA GGCTAGCTACAACGA GTGGTGGG | 6751 |
| 1010 | CACCACGU G CCAGAUGG | 112 | CCATCTGG GGCTAGCTACAACGA ACGTGGTG | 6752 |
| 1015 | CGUACCAG G UGGAUGUG | 2797 | CACATCCA GGCTAGCTACAACGA CTGGTACG | 6753 |
| 1019 | CCAGAUGG G UGUGAACC | 2798 | GGTTCACA GGCTAGCTACAACGA CCATCTGG | 6754 |
| 1021 | AGAUGGAU G UGAACCCC | 2256 | GGGGTTCA GCCTACCTACAACGA ATCCATCT | 6755 |
| 1025 | GGAUGUGA G CCCCGAGG | 2799 | CCTCGGGG GGCTAGCTACAACGA TCACATCC | 6756 |
| 1034 | CCCCGAGG G CAAAUACA | 2257 | TGTATTTG GGCTAGCTACAACGA CCTCGGGG | 6757 |
| 1038 | GAGGGCAA G UACAGCUU | 2800 | AAGCTGTA GGCTAGCTACAACGA TTGCCCTC | 6758 |
| 1040 | GGGCAAAU G CAGCUUUG | 113 | CAAAGCTG GGCTAGCTACAACGA ATTTGCCC | 6759 |
| 1043 | CAAAUACA G CUUUGGUG | 2258 | CACCAAAG GGCTAGCTACAACGA TGTATTTG | 6760 |
| 1049 | CAGCUUUG G UGCCACCU | 2259 | AGGTGGCA GGCTAGCTACAACGA CAAAGCTG | 6761 |
| 1051 | GCUUUGGU G CCACCUGC | 2260 | GCAGCTGG GCCTAGCTACAACGA ACCAAAGC | 6762 |
| 1054 | UUGGUGCC G CCUGCGUG | 1079 | CACGCAGG GGCTAGCTACAACGA GGCACCAA | 6763 |
| 1058 | UGCCACCU G CGUCAAGA | 2261 | TCTTCACG GGCTAGCTACAACGA AGGTGGCA | 6764 |
| 1060 | CCACCUGC G UGAAGAAC | 2262 | CTTCTTCA GGCTAGCTACAACGA GCAGGTGG | 6765 |
| 1068 | GUGAAGAA G UGUCCCCG | 2263 | CGGGGACA GGCTAGCTACAACGA TTCTTCAC | 6766 |
| 1070 | GAAGAAGU G UCCCCGUA | 2264 | TACGGGGA GGCTAGCTACAACGA ACTTCTTC | 6767 |
| 1076 | GUGUCCCC G UAAUUAUG | 2265 | CATAATTA GGCTAGCTACAACGA GGGCACAC | 6768 |
| 1079 | UCCCCGUA G UUAUGUGG | 2801 | CCACATAA GGCTAGCTACAACGA TACGGGGA | 6769 |
| 1082 | CCGUAAUU G UGUGGUGA | 119 | TCACCACA GGCTAGCTACAACGA AATTACGG | 6770 |
| 1084 | GUAAUUAU G UGGUGACA | 2266 | TGTCACCA GGCTAGCTACAACGA ATAATTAC | 6771 |
| 1087 | AUUAUGUG G UGACAGAU | 2267 | ATCTGTCA GGCTAGCTACAACGA CACATAAT | 6772 |
| 1090 | AUGUGGUG G CAGAUCAC | 2802 | GTGATCTG GGCTAGCTACAACGA CACCACAT | 6773 |
| 1094 | GGUGACAG G UCACGGCU | 2803 | AGCCGTGA GGCTAGCTACAACGA CTGTCACC | 6774 |
| 1097 | GACAGAUC G CGGCUCGU | 1086 | ACGAGCCG GGCTAGCTACAACGA GATCTGTC | 6775 |
| 1100 | AGAUCACG G CUCGUGCG | 2268 | CGCACGAG GGCTAGCTACAACGA CGTGATCT | 6776 |
| 1104 | CACGGCUC G UGCGUCCG | 2269 | CGGACGCA GGCTAGCTACAACGA GAGCCGTG | 6777 |
| 1106 | CGGCUCGU G CGUCCGAG | 2270 | CTCGGACG GGCTAGCTACAACGA ACGAGCCG | 6778 |
| 1108 | GCUCGUGC G UCCGAGCC | 2271 | GGCTCGGA GGCTAGCTACAACGA GCACGAGC | 6779 |
| 1114 | GCGUCCGA G CCUGUGGG | 2272 | CCCACAGG GGCTAGCTACAACGA TCGGACGC | 6780 |
| 1118 | CCGAGCCU G UGGGGCCG | 2273 | CGGCCCCA GGCTAGCTACAACGA AGGCTCGG | 6781 |
| 1123 | CCUGUGGG G CCGACAGC | 2274 | GCTGTCGG GGCTAGCTACAACGA CCCACAGG | 6782 |
| 1127 | UGGGGCCG G CAGCUAUG | 2804 | CATAGCTG GGCTAGCTACAACGA CGGCCCCA | 6783 |
| 1130 | GGCCGACA G CUAUGAGA | 2275 | TCTCATAG GGCTAGCTACAACGA TGTCGGCC | 6784 |
| 1133 | CGACAGCU G UGAGAUGG | 123 | CCATCTCA GGCTAGCTACAACGA AGCTGTCG | 6785 |
| 1138 | GCUAUGAG G UGGAGGAA | 2805 | TTCCTCCA GGCTAGCTACAACGA CTCATAGC | 6786 |
| 1148 | GGAGGAAG G CGGCGUCC | 2806 | GGACGCCG GGCTAGCTACAACGA CTTCCTCC | 6787 |
| 1151 | GGAAGACG G CGUCCGCA | 2276 | TGCGGACG GGCTAGCTACAACGA CGTCTTCC | 6788 |
| 1153 | AAGACGGC G UCCGCAAG | 2277 | CTTGCGGA GGCTAGCTACAACGA GCCGTCTT | 6789 |
| 1157 | CGGCGUCC G CAAGUGUA | 2278 | TACACTTG GGCTAGCTACAACGA GGACGCCG | 6790 |
| 1161 | GUCCGCAA G UGUAAGAA | 2279 | TTCTTACA GGCTAGCTACAACGA TTGCGGAC | 6791 |
| 1163 | CCGCAAGU G UAAGAAGU | 2280 | ACTTCTTA GGCTAGCTACAACGA ACTTGCGG | 6792 |
| 1170 | UGUAAGAA G UGCGAAGG | 2281 | CCTTCGCA GGCTAGCTACAACGA TTCTTACA | 6793 |
| 1172 | UAAGAAGU G CGAAGGGC | 2282 | GCCCTTCG GGCTAGCTACAACGA ACTTCTTA | 6794 |
| 1179 | UGCGAAGG G CCUUGCCG | 2283 | CGGCAAGG GGCTAGCTACAACGA CCTTCGCA | 6795 |
| 1184 | AGGGCCUU G CCGCAAAG | 2284 | CTTTGCGG GGCTAGCTACAACGA AAGGCCCT | 6796 |
| 1187 | GCCUUGCC G CAAAGUGU | 2285 | ACACTTTG GGCTAGCTACAACGA GGCAAGGC | 6797 |
| 1192 | GCCGCAAA G UGUGUAAC | 2286 | GTTACACA GGCTAGCTACAACGA TTTGCGGC | 6798 |
| 1194 | CGCAAAGU G UGUAACGG | 2287 | CCGTTACA GGCTAGCTACAACGA ACTTTGCG | 6799 |
| 1196 | CAAAGUGU G UAACGGAA | 2288 | TTCCGTTA GGCTAGCTACAACGA ACACTTTG | 6800 |
| 1199 | AGUGUGUA G CGGAAUAG | 2807 | CTATTCCG GGCTAGCTACAACGA TACACACT | 6801 |
| 1204 | GUAACGGA G UAGGUAUU | 2808 | AATACCTA GGCTAGCTACAACGA TCCGTTAC | 6802 |
| 1208 | CGGAAUAG G UAUUGGUG | 2289 | CACCAATA GGCTAGCTACAACGA CTATTCCG | 6803 |
| 1210 | GAAUAGGU G UUGGUGAA | 129 | TTCACCAA GGCTAGCTACAACGA ACCTATTC | 6804 |
| 1214 | AGGUAUUG G UGAAUUUA | 2290 | TAAATTCA GGCTAGCTACAACGA CAATACCT | 6805 |
| 1218 | AUUGGUGA G UUUAAAGA | 2809 | TCTTTAAA GGCTAGCTACAACGA TCACCAAT | 6806 |
| 1226 | AUUUAAAG G CUCACUCU | 2810 | AGAGTGAG GGCTAGCTACAACGA CTTTAAAT | 6807 |
| 1230 | AAAGACUC G CUCUCCAU | 1101 | ATGGAGAG GGCTAGCTACAACGA GAGTCTTT | 6808 |
| 1237 | CACUCUCC G UAAAUGCU | 1105 | AGCATTTA GGCTAGCTACAACGA GGAGAGTG | 6809 |
| 1241 | CUCCAUAA G UGCUACGA | 2811 | TCGTAGCA GGCTAGCTACAACGA TTATGGAG | 6810 |
| 1243 | CCAUAAAU G CUACGAAU | 2291 | ATTCGTAG GGCTAGCTACAACGA ATTTATGG | 6811 |
| 1246 | UAAAUGCU G CGAAUAUU | 138 | AATATTCG GGCTAGCTACAACGA AGCATTTA | 6812 |
| 1250 | UGCUACGA G UAUUAAAC | 2812 | GTTTAATA GGCTAGCTACAACGA TCGTAGCA | 6813 |
| 1252 | CUACGAAU G UUAAACAC | 139 | GTGTTTAA GGCTAGCTACAACGA ATTCGTAG | 6814 |
| 1257 | AAUAUUAA G CACUUCAA | 2813 | TTGAAGTG GGCTAGCTACAACGA TTAATATT | 6815 |
| 1259 | UAUUAAAC G CUUCAAAA | 1107 | TTTTGAAG GGCTAGCTACAACGA GTTTAATA | 6816 |
| 1268 | CUUCAAAA G CUGCACCU | 2814 | AGGTGCAG GGCTAGCTACAACGA TTTTGAAG | 6817 |
| 1271 | CAAAAACU G CACCUCCA | 2292 | TGGAGGTG GGCTAGCTACAACGA AGTTTTTG | 6818 |
| 1273 | AAAACUGC G CCUCCAUC | 1111 | GATGGAGG GGCTAGCTACAACGA GCAGTTTT | 6819 |
| 1279 | GCACCUCC G UCAGUGGC | 1115 | GCCACTGA GGCTAGCTACAACGA GGAGGTGC | 6820 |
| 1283 | CUCCAUCA G UGGCGAUC | 2293 | GATCGCCA GGCTAGCTACAACGA TGATGGAG | 6821 |
| 1286 | CAUCAGUG G CGAUCUCC | 2294 | GGAGATCG GGCTAGCTACAACGA CACTGATG | 6822 |
| 1289 | CAGUGGCG G UCUCCACA | 2815 | TGTGGAGA GGCTAGCTACAACGA CGCCACTG | 6823 |
| 1295 | CGAUCUCC G CAUCCUGC | 1119 | GCAGGATG GGCTAGCTACAACGA GGAGATCG | 6824 |
| 1297 | AUCUCCAC G UCCUGCCG | 1120 | CGGCAGGA GGCTAGCTACAACGA GTGGAGAT | 6825 |
| 1302 | CACAUCCU G CCGGUGGC | 2295 | GCCACCGG GGCTAGCTACAACGA AGGATGTG | 6826 |
| 1306 | UCCUGCCG G UGGCAUUU | 2296 | AAATGCCA GGCTAGCTACAACGA CGGCAGGA | 6827 |
| 1309 | UGCCGGUG G CAUUUAGG | 2297 | CCTAAATG GGCTAGCTACAACGA CACCGGCA | 6828 |
| 1311 | CCGGUGGC G UUUAGGGG | 1124 | CCCCTAAA GGCTAGCTACAACGA GCCACCGG | 6829 |
| 1319 | AUUUAGGG G UGACUCCU | 2298 | AGGAGICA GGCTAGCTACAACGA CCCTAAAT | 6830 |
| 1322 | UAGGGGUG G CUCCUUCA | 2816 | TGAAGGAG GGCTAGCTACAACGA CACCCCTA | 6831 |
| 1330 | ACUCCUUC G CACAUACU | 1128 | AGTATGTG GGCTAGCTACAACGA GAAGGAGT | 6832 |
| 1332 | UCCUUCAC G CAUACUCC | 1129 | GGAGTATG GGCTAGCTACAACGA GTGAAGGA | 6833 |
| 1334 | CUUCACAC G UACUCCUC | 1130 | GAGGAGTA GGCTAGCTACAACGA GTGTGAAG | 6834 |
| 1336 | UCACACAU G CUCCUCCU | 155 | AGGAGGAG GGCTAGCTACAACGA ATGTGTGA | 6835 |
| 1349 | UCCUCUGG G UCCACAGG | 2817 | CCTGTGGA GGCTAGCTACAACGA CCAGAGGA | 6836 |
| 1353 | CUGGAUCC G CAGGAACU | 1138 | AGTTCCTG GGCTAGCTACAACGA GGATCCAG | 6837 |
| 1359 | CCACAGGA G CUGGAUAU | 2818 | ATATCCAG GGCTAGCTACAACGA TCCTGTGG | 6838 |
| 1364 | GGAACUGG G UAUUCUGA | 2819 | TCAGAATA GGCTAGCTACAACGA CCAGTTCC | 6839 |
| 1366 | AACUGGAU G UUCUGAAA | 160 | TTTCAGAA GGCTAGCTACAACGA ATCCAGTT | 6840 |
| 1375 | UUCUGAAA G CCGUAAAG | 2820 | CTTTACGG GGCTAGCTACAACGA TTTCAGAA | 6841 |
| 1378 | UGAAAACC G UAAAGGAA | 2299 | TTCCTTTA GGCTAGCTACAACGA GGTTTTCA | 6842 |
| 1387 | UAAAGGAA G UCACAGGG | 2821 | CCCTGTGA GGCTAGCTACAACGA TTCCTTTA | 6843 |
| 1390 | AGGAAAUC G CAGGGUUU | 1143 | AAACCCTG GGCTAGCTACAACGA GATTTCCT | 6844 |
| 1395 | AUCACAGG G UUUUUGCU | 2300 | AGCAAAAA GGCTAGCTACAACGA CCTGTGAT | 6845 |
| 1401 | GGGUUUUU G CUGAUUCA | 2301 | TGAATCAG GGCTAGCTACAACGA AAAAACCC | 6846 |
| 1405 | UUUUGCUG G UUCAGGCU | 2822 | AGCCTGAA GGCTAGCTACAACGA CAGCAAAA | 6847 |
| 1411 | UGAUUCAG G CUUGGCCU | 2302 | AGGCCAAG GGCTAGCTACAACGA CTGAATCA | 6848 |
| 1416 | CAGGCUUG G CCUGAAAA | 2303 | TTTTCAGG GGCTAGCTACAACGA CAAGCCTG | 6849 |
| 1424 | GCCUGAAA G CAGGACGG | 2823 | CCGTCCTG GGCTAGCTACAACGA TTTCAGGC | 6850 |
| 1429 | AAAACAGG G CGGACCUC | 2824 | GAGGTCCG GGCTAGCTACAACGA CCTGTTTT | 6851 |
| 1433 | CAGGACGG G CCUCCAUG | 2825 | CATGGAGG GGCTAGCTACAACGA CCGTCCTG | 6852 |
| 1439 | GGACCUCC G UGCCUUUG | 1154 | CAAAGGCA GGCTAGCTACAACGA GGAGGTCC | 6853 |
| 1441 | ACCUCCAU G CCUUUGAG | 2304 | CTCAAAGG GGCTAGCTACAACGA ATGGAGGT | 6854 |
| 1451 | CUUUGAGA G CCUAGAAA | 2826 | TTTCTAGG GGCTAGCTACAACGA TCTCAAAG | 6855 |
| 1459 | ACCUAGAA G UCAUACGC | 2827 | GCGTATGA GGCTAGCTACAACGA TTCTAGGT | 6856 |
| 1462 | UAGAAAUC G UACGCGGC | 1159 | GCCGCGTA GGCTAGCTACAACGA GATTTCTA | 6857 |
| 1464 | GAAAUCAU G CGCGGCAG | 177 | CTGCCGCG GGCTAGCTACAACGA ATGATTTC | 6858 |
| 1466 | AAUCAUAC G CGGCAGGA | 2305 | TCCTGCCG GGCTAGCTACAACGA GTATGATT | 6859 |
| 1469 | CAUACGCG G CAGGACCA | 2306 | TGGTCCTG GGCTAGCTACAACGA CGCGTATG | 6860 |
| 1474 | GCGGCAGG G CCAAGCAA | 2828 | TTGCTTGG GGCTAGCTACAACGA CCTGCCGC | 6861 |
| 1479 | AGGACCAA G CAACAUGG | 2307 | CCATGTTG GGCTAGCTACAACGA TTGGTCCT | 6862 |
| 1482 | ACCAAGCA G CAUGGUCA | 2829 | TGACCATG GGCTAGCTACAACGA TGCTTGGT | 6863 |
| 1484 | CAAGCAAC G UGGUCAGU | 1164 | ACTGACCA GGCTAGCTACAACGA GTTGCTTG | 6864 |
| 1487 | GCAACAUG G UCAGUUUU | 2308 | AAAACTGA GGCTAGCTACAACGA CATGTTGC | 6865 |
| 1491 | CAUGGUCA G UUUUCUCU | 2309 | AGAGAAAA GGCTAGCTACAACGA TGACCATG | 6866 |
| 1501 | UUUCUCUU G CAGUCGUC | 2310 | GACGACTG GGCTAGCTACAACGA AAGAGAAA | 6867 |
| 1504 | CUCUUGCA G UCGUCAGC | 2311 | GCTGACGA GGCTAGCTACAACGA TGCAAGAG | 6868 |
| 1507 | UUGCAGUC G UCAGCCUG | 2312 | CAGGCTGA GGCTAGCTACAACGA GACTGCAA | 6869 |
| 1511 | AGUCGUCA G CCUGAACA | 2313 | TGTTCAGG GGCTAGCTACAACGA TGACGACT | 6870 |
| 1517 | CAGCCUGA G CAUAACAU | 2830 | ATGTTATG GGCTAGCTACAACGA TCAGGCTG | 6871 |
| 1519 | GCCUGAAC G UAACAUCC | 1172 | GGATGTTA GGCTAGCTACAACGA GTTCAGGC | 6872 |
| 1522 | UGAACAUA G CAUCCUUG | 2831 | CAAGGATG GGCTAGCTACAACGA TATGTTCA | 6873 |
| 1524 | AACAUAAC G UCCUUGGG | 1173 | CCCAAGGA GGCTAGCTACAACGA GTTATGTT | 6874 |
| 1533 | UCCUUGGG G UUACGCUC | 2832 | GAGCGTAA GGCTAGCTACAACGA CCCAAGGA | 6875 |
| 1536 | UUGGGAUU G CGCUCCCU | 191 | AGGGAGCG GGCTAGCTACAACGA AATCCCAA | 6876 |
| 1538 | GGGAUUAC G CUCCCUCA | 2314 | TGAGGGAG GGCTAGCTACAACGA GTAATCCC | 6877 |
| 1552 | UCAAGGAG G UAAGUGAU | 2833 | ATCACTTA GGCTAGCTACAACGA CTCCTTGA | 6878 |
| 1556 | GGAGAUAA G UGAUGGAG | 2315 | CTCCATCA GGCTAGCTACAACGA TTATCTCC | 6879 |
| 1559 | GAUAAGUG G UGGAGAUG | 2834 | CATCTCCA GGCTAGCTACAACGA CACTTATC | 6880 |
| 1565 | UGAUGGAG G UGUGAUAA | 2835 | TTATCACA GGCTAGCTACAACGA CTCCATCA | 6881 |
| 1567 | AUGGAGAU G UGAUAAUU | 2316 | AATTATCA GGCTAGCTACAACGA ATCTCCAT | 6882 |
| 1570 | GAGAUGUG G UAAUUUCA | 836 | TGAAATTA GGCTAGCTACAACGA CACATCTC | 6883 |
| 1573 | AUGUGAUA G UUUCAGGA | 2837 | TCCTGAAA GGCTAGCTACAACGA TATCACAT | 6884 |
| 1583 | UUCAGGAA G CAAAAAUU | 2838 | AATTTTTG GGCTAGCTACAACGA TTCCTGAA | 6885 |
| 1589 | AAACAAAA G UUUGUGCU | 2839 | AGCACAAA GGCTAGCTACAACGA TTTTGTTT | 6886 |
| 1593 | AAAAAUUU G UGCUAUGC | 2317 | GCATAGCA GGCTAGCTACAACGA AAATTTTT | 6887 |
| 1595 | AAAUUUGU G CUAUGCAA | 2318 | TTGCATAG GGCTAGCTACAACGA ACAAATTT | 6888 |
| 1598 | UUUGUGCU G UGCAAAUA | 201 | TATTTGCA GGCTAGCTACAACGA AGCACAAA | 6889 |
| 1600 | UGUGCUAU G CAAAUACA | 2319 | TGTATTTG GGCTAGCTACAACGA ATAGCACA | 6890 |
| 1604 | CUAUGCAA G UACAAUAA | 2840 | TTATTGTA GGCTAGCTACAACGA TTGCATAG | 6891 |
| 1606 | AUGCAAAU G CAAUAAAC | 202 | GTTTATTG GGCTAGCTACAACGA ATTTGCAT | 6892 |
| 1609 | CAAAUACA G UAAACUGG | 2841 | CCAGTTTA GGCTAGCTACAACGA TGTATTTG | 6893 |
| 1613 | UACAAUAA G CUGGAAAA | 2842 | TTTTCCAG GGCTAGCTACAACGA TTATTGTA | 6894 |
| 1623 | UGGAAAAA G CUGUUUGG | 2843 | CCAAACAG GGCTAGCTACAACGA TTTTTCCA | 6895 |
| 1626 | AAAAAACU G UUUGGGAC | 2320 | GTCCCAAA GGCTAGCTACAACGA AGTTTTTT | 6896 |
| 1633 | UGUUUGGG G CCUCCGGU | 2844 | ACCGGAGG GGCTAGCTACAACGA CCCAAACA | 6897 |
| 1640 | GACCUCCG G UCAGAAAA | 2321 | TTTTCTGA GGCTAGCTACAACGA CGGAGGTC | 6898 |
| 1648 | GUCAGAAA G CCAAAAUU | 2845 | AATTTTGG GGCTAGCTACAACGA TTTCTGAC | 6899 |
| 1654 | AAACCAAA G UUAUAAGC | 2846 GCTTATAA GGCTAGCTACAACGA TTTGGTTT | 6900 | |
| 1657 | CCAAAAUU G UAAGCAAC | 209 | GTTGCTTA GGCTAGCTACAACGA AATTTTGG | 6901 |
| 1661 | AAUUAUAA G CAACAGAG | 2322 | CTCTGTTG GGCTAGCTACAACGA TTATAATT | 6902 |
| 1664 | UAUAAGCA G CAGAGGUG | 2847 | CACCTCTG GGCTAGCTACAACGA TGCTTATA | 6903 |
| 1670 | CAACAGAG G UGAAAACA | 2323 | TGTTTTCA GGCTAGCTACAACGA CTCTGTTG | 6904 |
| 1676 | AGGUGAAA G CAGCUGCA | 2848 | TGCAGCTG GGCTAGCTACAACGA TTTCACCT | 6905 |
| 1679 | UGAAAACA G CUGCAAGG | 2324 | CCTTGCAG GGCTAGCTACAACGA TGTTTTCA | 6906 |
| 1682 | AAACAGCU G CAAGGCCA | 2325 | TGGCCTTG GGCTAGCTACAACGA AGCTGTTT | 6907 |
| 1687 | GCUGCAAG G CCACAGGC | 2326 | GCCTGTGG GGCTAGCTACAACGA CTTGCAGC | 6908 |
| 1690 | GCAAGGCC G CAGGCCAG | 1200 | CTGGCCTG GGCTAGCTACAACGA GGCCTTGC | 6909 |
| 1694 | GGCCACAG G CCAGGUCU | 2327 | AGACCTGG GGCTAGCTACAACGA CTGTGGCC | 6910 |
| 1699 | CAGGCCAG G UCUGCCAU | 2328 | ATGGCAGA GGCTAGCTACAACGA CTGGCCTG | 6911 |
| 1703 | CCAGGUCU G CCAUGCCU | 2329 | AGGCATGG GGCTAGCTACAACGA AGACCTGG | 6912 |
| 1706 | GGUCUGCC G UGCCUUGU | 1206 | ACAAGGCA GGCTAGCTACAACGA GGCAGACC | 6913 |
| 1708 | UCUGCCAU G CCUUGUGC | 2330 | GCACAAGG GGCTAGCTACAACGA ATGGCAGA | 6914 |
| 1713 | CAUGCCUU G UGCUCCCC | 2331 | GGGGAGCA GGCTAGCTACAACGA AAGGCATG | 6915 |
| 1715 | UGCCUUGU G CUCCCCCG | 2332 | CGGGGGAG GGCTAGCTACAACGA ACAAGGCA | 6916 |
| 1727 | CCCCGAGG G CUGCUGGG | 2333 | CCCAGCAG GGCTAGCTACAACGA CCTCGGGG | 6917 |
| 1730 | CGAGGGCU G CUGGGGCC | 2334 | GGCCCCAG GGCTAGCTACAACGA AGCCCTCG | 6918 |
| 1736 | CUGCUGGG G CCCGGAGC | 2335 | GCTCCGGG GGCTAGCTACAACGA CCCAGCAG | 6919 |
| 1743 | GGCCCGGA G CCCAGGGA | 2336 | TCCCTGGG GGCTAGCTACAACGA TCCGGGCC | 6920 |
| 1751 | GCCCAGGG G CUGCGUCU | 2849 | AGACGCAG GGCTAGCTACAACGA CCCTGGGC | 6921 |
| 1754 | CAGGGACU G CGUCUCUU | 2337 | AAGAGACG GGCTAGCTACAACGA AGTCCCTG | 6922 |
| 1756 | GGGACUGC G UCUCUUGC | 2338 | GCAAGAGA GGCTAGCTACAACGA GCAGTCCC | 6923 |
| 1763 | CGUCUCUU G CCGGAAUG | 2339 | CATTCCGG GGCTAGCTACAACGA AAGAGACG | 6924 |
| 1769 | UUGCCGGA G UGUCAGCC | 2850 | GGCTGACA GGCTAGCTACAACGA TCCGGCAA | 6925 |
| 1771 | GCCGGAAU G UCAGCCGA | 2340 | TCGGCTGA GGCTAGCTACAACGA ATTCCGGC | 6926 |
| 1775 | GAAUGUCA G CCGAGGCA | 2341 | TGCCTCGG GGCTAGCTACAACGA TGACATTC | 6927 |
| 1781 | CAGCCGAG G CAGGGAAU | 2342 | ATTCCCTG GGCTAGCTACAACGA CTCGGCTG | 6928 |
| 1788 | GGCAGGGA G UGCGUGGA | 2851 | TCCACGCA GGCTAGCTACAACGA TCCCTGCC | 6929 |
| 1790 | CAGGGAAU G CGUGGACA | 2343 | TGTCCACG GGCTAGCTACAACGA ATTCCCTG | 6930 |
| 1792 | GGGAAUGC G UGGACAAG | 2344 | CTTGTCCA GGCTAGCTACAACGA GCATTCCC | 6931 |
| 1796 | AUGCGUGG G CAAGUGCA | 2852 | TGCACTTG GGCTAGCTACAACGA CCACGCAT | 6932 |
| 1800 | GUGGACAA G UGCAAGCU | 2345 | AGCTTGCA GGCTAGCTACAACGA TTGTCCAC | 6933 |
| 1802 | GGACAAGU G CAAGCUUC | 2346 | GAAGCTTG GGCTAGCTACAACGA ACTTGTCC | 6934 |
| 1806 | AAGUGCAA G CUUCUGGA | 2347 | TCCAGAAG GGCTAGCTACAACGA TTGCACTT | 6935 |
| 1817 | UCUGGAGG G UGAGCCAA | 2348 | TTGGCTCA GGCTAGCTACAACGA CCTCCAGA | 6936 |
| 1821 | GAGGGUGA G CCAAGGGA | 2349 | TCCCTTGG GGCTAGCTACAACGA TCACCCTC | 6937 |
| 1830 | CCAAGGGA G UUUGUGGA | 2350 | TCCACAAA GGCTAGCTACAACGA TCCCTTGG | 6938 |
| 1834 | GGGAGUUU G UGGAGAAC | 2351 | GTTCTCCA GGCTAGCTACAACGA AAACTCCC | 6939 |
| 1841 | UGUGGAGA G CUCUGAGU | 2853 | ACTCAGAG GGCTAGCTACAACGA TCTCCACA | 6940 |
| 1848 | AACUCUGA G UGCAUACA | 2352 | TGTATGCA GGCTAGCTACAACGA TCAGAGTT | 6941 |
| 1850 | CUCUGAGU G CAUACAGU | 2353 | ACTGTATG GGCTAGCTACAACGA ACTCAGAG | 6942 |
| 1852 | CUGAGUGC G UACAGUGC | 1236 | GCACTGTA GGCTAGCTACAACGA GCACTCAG | 6943 |
| 1854 | GAGUGCAU G CAGUOCCA | 223 | TGGCACTG GGCTAGCTACAACGA ATGCACTC | 6944 |
| 1857 | UGCAUACA G UGCCACCC | 2354 | GGGTGGCA GGCTAGCTACAACGA TGTATGCA | 6945 |
| 1859 | CAUACAGU G CCACCCAG | 2355 | CTGGGTGG GGCTAGCTACAACGA ACTGTATG | 6946 |
| 1862 | ACAGUGCC G CCCAGAGU | 1239 | ACTCTGGG GGCTAGCTACAACGA GGCACTGT | 6947 |
| 1869 | CACCCAGA G UGCCUGCC | 2356 | GGCAGGCA GGCTAGCTACAACGA TCTGGGTG | 6948 |
| 1871 | CCCAGAGU G CCUGCCUC | 2357 | GAGGCAGG GGCTAGCTACAACGA ACTCTGGG | 6949 |
| 1875 | GAGUGCCU G CCUCAGGC | 2358 | GCCTGAGG GGCTAGCTACAACGA AGGCACTC | 6950 |
| 1882 | UGCCUCAG G CCAUGAAC | 2359 | GTTCATGG GGCTAGCTACAACGA CTGAGGCA | 6951 |
| 1885 | CUCAGGCC G UGAACAUC | 1249 | GATGTTCA GGCTAGCTACAACGA GGCCTGAG | 6952 |
| 1889 | GGCCAUGA G CAUCACCU | 2854 | AGGTGATG GGCTAGCTACAACGA TCATGGCC | 6953 |
| 1891 | CCAUGAAC G UCACCUGC | 1250 | GCAGGTGA GGCTAGCTACAACGA GTTCATGG | 6954 |
| 1894 | UGAACAUC G CCUGCACA | 1251 | TGTGCAGG GGCTAGCTACAACGA GATGTTCA | 6955 |
| 1898 | CAUCACCU G CACAGGAC | 2360 | GTCCTGTG GGCTAGCTACAACGA AGGTGATG | 6956 |
| 1900 | UCACCUGC G CAGGACGG | 1254 | CCGTCCTG GGCTAGCTACAACGA GCAGGTGA | 6957 |
| 1905 | UGCACAGG G CGGGGACC | 2855 | GGTCCCCG GGCTAGCTACAACGA CCTGTGCA | 6958 |
| 1911 | GGACGGGG G CCAGACAA | 2856 | TTGTCTGG GGCTAGCTACAACGA CCCCGTCC | 6959 |
| 1916 | GGGACCAG G CAACUGUA | 2857 | TACAGTTG GGCTAGCTACAACGA CTGGTCCC | 6960 |
| 1919 | ACCAGACA G CUGUAUCC | 2858 | GGATACAG GGCTAGCTACAACGA TGTCTGGT | 6961 |
| 1922 | AGACAACU G UAUCCAGU | 2361 | ACTGGATA GGCTAGCTACAACGA AGTTGTCT | 6962 |
| 1924 | ACAACUGU G UCCAGUGU | 226 | ACACTGGA GGCTAGCTACAACGA ACAGTTGT | 6963 |
| 1929 | UGUAUCCA G UGUGCCCA | 2362 | TGGGCACA GGCTAGCTACAACGA TGGATACA | 6964 |
| 1931 | UAUCCAGU G UGCCCACU | 2363 | AGTGGGCA GGCTAGCTACAACGA ACTGGATA | 6965 |
| 1933 | UCCAGUGU G CCCACUAC | 2364 | GTAGTGGG GGCTAGCTACAACGA ACACTGGA | 6966 |
| 1937 | GUGUGCCC G CUACAUUG | 1264 | CAATGTAG GGCTAGCTACAACGA GGGCACAC | 6967 |
| 1940 | UGCCCACU G CAUUGACG | 228 | CGTCAATG GGCTAGCTACAACGA AGTGGGCA | 6968 |
| 1942 | CCCACUAC G TTGACGGC | 1266 | GCCGTCAA GGCTAGCTACAACGA GTAGTGGG | 6969 |
| 1946 | CUACAUUG G CGGCCCCC | 2859 | GGGGGCCG GGCTAGCTACAACGA CAATGTAG | 6970 |
| 1949 | CAUUGACG G CCCCCACU | 2365 | AGTGGGGG GGCTAGCTACAACGA CGTCAATG | 6971 |
| 1955 | CGGCCCCC G CUGCGUCA | 1271 | TGACGCAG GGCTAGCTACAACGA GGGGGCCG | 6972 |
| 1958 | CCCCCACU G CGUCAAGA | 2366 | TCTTGACG GGCTAGCTACAACGA AGTGGGGG | 6973 |
| 1960 | CCCACUGC G UCAAGACC | 2367 | GGTCTTGA GGCTAGCTACAACGA GCAGTGGG | 6974 |
| 1966 | GCGUCAAG G CCUGCCCG | 2860 | CGGGCAGG GGCTAGCTACAACGA CTTGACGC | 6973 |
| 1970 | CAAGACCU G CCCGGCAG | 2368 | CTGCCGGG GGCTAGCTACAACGA AGGTCTTG | 6976 |
| 1975 | CCUGCCCG G CAGGAGUC | 2369 | GACTCCTG GGCTAGCTACAACGA CGGGCAGG | 6977 |
| 1981 | CGGCAGGA G UCAUGGGA | 2370 | TCCCATGA GGCTAGCTACAACGA TCCTGCCG | 6978 |
| 1984 | CAGGAGUC G UGGGAGAA | 1279 | TTCTCCCA GGCTAGCTACAACGA GACTCCTG | 6979 |
| 1994 | GGGAGAAA G CAACACCC | 2861 | GGGTGTTG GGCTAGCTACAACGA TTTCTCCC | 6980 |
| 1997 | AGAAAACA G CACCCUGG | 2862 | CCAGGGTG GGCTAGCTACAACGA TGTTTTCT | 6981 |
| 1999 | AAAACAAC G CCCUGGUC | 1281 | GACCAGGG GGCTAGCTACAACGA GTTGTTTT | 6982 |
| 2005 | ACACCCUG G UCUGGAAG | 2371 | CTTCCAGA GGCTAGCTACAACGA CAGGGTGT | 6983 |
| 2013 | GUCUGGAA G UACGCAGA | 2372 | TCTGCGTA GGCTAGCTACAACGA TTCCAGAC | 6984 |
| 2015 | CUGGAAGU G CGCAGACG | 233 | CGTCTGCG GGCTAGCTACAACGA ACTTCCAG | 6985 |
| 2017 | GGAAGUAC G CAGACGCC | 2373 | GGCGTCTG GGCTAGCTACAACGA GTACTTCC | 6986 |
| 2021 | GUACGCAG G CGCCGGCC | 2863 | GGCCGGCG GGCTAGCTACAACGA CTGCGTAC | 6987 |
| 2023 | ACGCAGAC G CCGGCCAU | 2374 | ATGGCCGG GGCTAGCTACAACGA GTCTGCGT | 6988 |
| 2027 | AGACGCCG G CCAUGUGU | 2375 | ACACATGG GGCTAGCTACAACGA CGGCGTCT | 6989 |
| 2030 | CGCCGGCC G UGUGUGCC | 1289 | GGCACACA GGCTAGCTACAACGA GGCCGGCG | 6990 |
| 2032 | CCGGCCAU G UGUGCCAC | 2376 | GTGGCACA GGCTAGCTACAACGA ATGGCCGG | 6991 |
| 2034 | GGCCAUGU G UGCCACCU | 2377 | AGGTGGCA GGCTAGCTACAACGA ACATGGCC | 6992 |
| 2036 | CCAUGUGU G CCACCUGU | 2378 | ACAGGTGG GGCTAGCTACAACGA ACACATGG | 6993 |
| 2039 | UGUGUGCC G CCUGUGCC | 1291 | GGCACAGG GGCTAGCTACAACGA GGCACACA | 6994 |
| 2043 | UGCCACCU G UGCCAUCC | 2379 | GGATGGCA GGCTAGCTACAACGA AGGTGGCA | 6995 |
| 2045 | CCACCUGU G CCAUCCAA | 2380 | TTGGATGG GGCTAGCTACAACGA ACAGGTGG | 6996 |
| 2048 | CCUGUGCC G UCCAAACU | 1295 | AGTTTGGA GGCTAGCTACAACGA GGCACAGG | 6997 |
| 2054 | CCAUCCAA G CUGCACCU | 2864 | AGGTGCAG GGCTAGCTACAACGA TTGGATGG | 6998 |
| 2057 | UCCAAACU G CACCUACG | 2381 | CGTAGGTG GGCTAGCTACAACGA AGTTTGGA | 6999 |
| 2059 | CAAACUGC G CCUACGGA | 1299 | TCCGTAGG GGCTAGCTACAACGA GCAGTTTG | 7000 |
| 2063 | CUGCACCU G CGGAUGCA | 235 | TGCATCCG GGCTAGCTACAACGA AGGTGCAG | 7001 |
| 2067 | ACCUACGG G UGCACUGG | 2865 | CCAGTGCA GGCTAGCTACAACGA CCGTAGGT | 7002 |
| 2069 | CUACGGAU G CACUGGGC | 2382 | GCCCAGTG GGCTAGCTACAACGA ATCCGTAG | 7003 |
| 2071 | ACGGAUGC G CUGGGCCA | 1302 | TGGCCCAG GGCTAGCTACAACGA GCATCCGT | 7004 |
| 2076 | UGCACUGG G CCAGGUCU | 2383 | AGACCTGG GGCTAGCTACAACGA CCAGTGCA | 7005 |
| 2081 | UGGGCCAG G UCUUGAAG | 2384 | CTTCAAGA GGCTAGCTACAACGA CTGGCCCA | 7006 |
| 2090 | UCUUGAAG G CUGUCCAA | 2385 | TTGGACAG GGCTAGCTACAACGA CTTCAAGA | 7007 |
| 2093 | UGAAGGCU G UCCAACGA | 2386 | TCGTTGGA GGCTAGCTACAACGA AGCCTTCA | 7008 |
| 2098 | GCUGUCCA G CGAAUGGG | 2866 | CCCATTCG GGCTAGCTACAACGA TGGACAGC | 7009 |
| 2102 | UCCAACGA G UGGGCCUA | 2867 | TAGGCCCA GGCTAGCTACAACGA TCGTTGGA | 7010 |
| 2106 | ACGAAUGG G CCUAAGAU | 2387 | ATCTTAGG GGCTAGCTACAACGA CCATTCGT | 7011 |
| 2113 | GGCCUAAG G UCCCGUCC | 2868 | GGACGGGA GGCTAGCTACAACGA CTTAGGCC | 7012 |
| 2118 | AAGAUCCC G UCCAUCGC | 2388 | GCGATGGA GGCTAGCTACAACGA GGGATCTT | 7013 |
| 2122 | UCCCGUCC G UCGCCACU | 1315 | AGTGGCGA GGCTAGCTACAACGA GGACGGGA | 7014 |
| 2125 | CGUCCAUC G CCACUGGG | 2389 | CCCAGTGG GGCTAGCTACAACGA GATGGACG | 7015 |
| 2128 | CCAUCGCC G CUGGGAUG | 1317 | CATCCCAG GGCTAGCTACAACGA GGCGATGG | 7016 |
| 2134 | CCACUGGG G UGGUGGGG | 2869 | CCCCACCA GGCTAGCTACAACGA CCCAGTGG | 7017 |
| 2137 | CUGGGAUG G UGGGGGCC | 2390 | GGCCCCCA GGCTAGCTACAACGA CATCCCAG | 7018 |
| 2143 | UGGUGGGG G CCCUCCUC | 2391 | GAGGAGGG GGCTAGCTACAACGA CCCCACCA | 7019 |
| 2154 | CUCCUCUU G CUGCUGGU | 2392 | ACCAGCAG GGCTAGCTACAACGA AAGAGGAG | 7020 |
| 2157 | CUCUUGCU G CUGGUGGU | 2393 | ACCACCAG GGCTAGCTACAACGA AGCAAGAG | 7021 |
| 2161 | UGCUGCUG G UGGUGGCC | 2394 | GGCCACCA GGCTAGCTACAACGA CAGCAGCA | 7022 |
| 2164 | UGCUGGUG G UGGCCCUG | 2395 | CAGGGCCA GGCTAGCTACAACGA CACCAGCA | 7023 |
| 2167 | UGGUGGUG G CCCUGGGG | 2396 | CCCCAGGG GGCTAGCTACAACGA CACCACCA | 7024 |
| 2180 | GGGGAUCG G CCUCUUCA | 2397 | TGAAGAGG GGCTAGCTACAACGA CGATCCCC | 7026 |
| 2188 | GCCUCUUC G UGCGAAGG | 1333 | CCTTCGCA GGCTAGCTACAACGA GAAGAGGC | 7027 |
| 2190 | CUCUUCAU G CGAAGGCG | 2398 | CGCCTTCG GGCTAGCTACAACGA ATGAAGAG | 7028 |
| 2196 | AUGCGAAG G CGCCACAU | 2399 | ATGTGGCG GGCTAGCTACAACGA CTTCGCAT | 7029 |
| 2198 | GCGAAGGC G CCACAUCG | 2400 | CGATGTGG GGCTAGCTACAACGA GCCTTCGC | 7030 |
| 2201 | AAGGCGCC G CAUCGUUC | 1335 | GAACGATG GGCTAGCTACAACGA GGCGCCTT | 7031 |
| 2203 | GGCGCCAC G UCGUUCGG | 1336 | CCGAACGA GGCTAGCTACAACGA GTGGCGCC | 7032 |
| 2206 | GCCACAUC G UUCGGAAG | 2401 | CTTCCGAA GGCTAGCTACAACGA GATGTGGC | 7033 |
| 2214 | GUUCGGAA G CGCACGCU | 2402 | AGCGTGCG GGCTAGCTACAACGA TTCCGAAC | 7034 |
| 2216 | UCGGAAGC G CACGCUGC | 2403 | GCAGCGTG GGCTAGCTACAACGA GCTTCCGA | 7035 |
| 2218 | GGAAGCGC G CGCUGCGG | 1337 | CCGCAGCG GGCTAGCTACAACGA GCGCTTCC | 7036 |
| 2220 | AAGCGCAC G CUGCGGAG | 2404 | CTCCGCAG GGCTAGCTACAACGA GTGCGCTT | 7037 |
| 2223 | CGCACGCU G CGGAGGCU | 2405 | AGCCTCCG GGCTAGCTACAACGA AGCGTGCG | 7038 |
| 2229 | CUGCGGAG G CUGCUGCA | 2406 | TGCAGCAG GGCTAGCTACAACGA CTCCGCAG | 7039 |
| 2232 | CGGAGGCU G CUGCAGGA | 2407 | TCCTGCAG GGCTAGCTACAACGA AGCCTCCG | 7040 |
| 2235 | AGGCUGCU G CAGGAGAG | 2408 | CTCTCCTG GGCTAGCTACAACGA AGCAGCCT | 7041 |
| 2247 | GAGAGGGA G CUUGUGGA | 2409 | TCCACAAG GGCTAGCTACAACGA TCCCTCTC | 7042 |
| 2251 | GGGAGCUU G UGGAGCCU | 2410 | AGGCTCCA GGCTAGCTACAACGA AAGCTCCC | 7043 |
| 2256 | CUUGUGGA G CCUCUUAC | 2411 | GTAAGAGG GGCTAGCTACAACGA TCCACAAG | 7044 |
| 2263 | AGCCUCUU G CACCCAGU | 256 | ACTGGGTG GGCTAGCTACAACGA AAGAGGCT | 7045 |
| 2265 | CCUCUUAC G CCCAGUGG | 1346 | CCACTGGG GGCTAGCTACAACGA GTAAGAGG | 7046 |
| 2270 | UACACCCA G UGGAGAAG | 2412 | CTTCTCCA GGCTAGCTACAACGA TGGGTGTA | 7047 |
| 2278 | GUGGAGAA G CUCCCAAC | 2413 | GTTGGGAG GGCTAGCTACAACGA TTCTCCAC | 7048 |
| 2285 | AGCUCCCA G CCAAGCUC | 2871 | GAGCTTGG GGCTAGCTACAACGA TGGGAGCT | 7049 |
| 2290 | CCAACCAA G CUCUCUUG | 2414 | CAAGAGAG GGCTAGCTACAACGA TTGGTTGG | 7050 |
| 2302 | UCUUGAGG G UCUUGAAG | 2872 | CTTCAAGA GGCTAGCTACAACGA CCTCAAGA | 7051 |
| 2314 | UGAAGGAA G CUGAAUUC | 2873 | GAATTCAG GGCTAGCTACAACGA TTCCTTCA | 7052 |
| 2319 | GAAACUGA G UUCAAAAA | 2874 | TTTTTGAA GGCTAGCTACAACGA TCAGTTTC | 7053 |
| 2329 | UCAAAAAG G UCAAAGUG | 2875 | CACTTTGA GGCTAGCTACAACGA CTTTTTGA | 7054 |
| 2335 | AGAUCAAA G UGCUGGGC | 2415 | GCCCAGCA GGCTAGCTACAACGA TTTGATCT | 7055 |
| 2337 | AUCAAAGU G CUGGGCUC | 2416 | GAGCCCAG GGCTAGCTACAACGA ACTTTGAT | 7056 |
| 2342 | AGUGCUGG G CUCCGGUG | 2417 | CACCGGAG GGCTAGCTACAACGA CCAGCACT | 7057 |
| 2348 | GGGCUCCG G UGCGUUCG | 2418 | CGAACGCA GGCTAGCTACAACGA CGGAGCCC | 7058 |
| 2350 | GCUCCGGU G CGUUCGGC | 2419 | GCCGAACG GGCTAGCTACAACGA ACCGGAGC | 7059 |
| 2352 | UCCGGUGC G UUCGGCAC | 2420 | GTGCCGAA GGCTAGCTACAACGA GCACCGGA | 7060 |
| 2357 | UGCGUUCG G CACGGUGU | 2421 | ACACCGTG GGCTAGCTACAACGA CGAACGCA | 7061 |
| 2359 | CGUUCGGC G CGGUGUAU | 1366 | ATACACCG GGCTAGCTACAACGA GCCGAACG | 7062 |
| 2362 | UCGGCACG G UGUAUAAG | 2422 | CTTATACA GGCTAGCTACAACGA CGTGCCGA | 7063 |
| 2364 | GGCACGGU G UAUAAGGG | 2423 | CCCTTATA GGCTAGCTACAACGA ACCGTGCC | 7064 |
| 2366 | CACGGUGU G UAAGGGAC | 269 | GTCCCTTA GGCTAGCTACAACGA ACACCGTG | 7065 |
| 2373 | UAUAAGGG G CUCUGGAU | 2876 | ATCCAGAG GGCTAGCTACAACGA CCCTTATA | 7066 |
| 2380 | GACUCUGG G UCCCAGAA | 2877 | TTCTGGGA GGCTAGCTACAACGA CCAGAGTC | 7067 |
| 2390 | CCCAGAAG G UGAGAAAG | 2424 | CTTTCTCA GGCTAGCTACAACGA CTTCTGGG | 7068 |
| 2398 | GUGAGAAA G UUAAAAUU | 2425 | AATTTTAA GGCTAGCTACAACGA TTTCTCAC | 7069 |
| 2404 | AAGUUAAA G UUCCCGUC | 2878 | GACGGGAA GGCTAGCTACAACGA TTTAACTT | 7070 |
| 2410 | AAAUUCCC G UCGCUAUC | 2426 | GATAGCGA GGCTAGCTACAACGA GGGAATTT | 7071 |
| 2413 | UUCCCGUC G CUAUCAAG | 2427 | CTTGATAG GGCTAGCTACAACGA GACGGGAA | 7072 |
| 2416 | CCGUCGCU G UCAAGGAA | 278 | TTCCTTGA GGCTAGCTACAACGA AGCGACGG | 7073 |
| 2424 | AUCAAGGA G UUAAGAGA | 2879 | TCTCTTAA GGCTAGCTACAACGA TCCTTGAT | 7074 |
| 2434 | UAAGAGAA G CAACAUCU | 2428 | AGATGTTG GGCTAGCTACAACGA TTCTCTTA | 7075 |
| 2437 | GAGAAGCA G CAUCUCCG | 2880 | CGGAGATG GGCTAGCTACAACGA TGCTTCTC | 7076 |
| 2439 | GAAGCAAC G UCUCCGAA | 1377 | TTCGGAGA GGCTAGCTACAACGA GTTGCTTC | 7077 |
| 2449 | CUCCGAAA G CCAACAAG | 2429 | CTTGTTGG GGCTAGCTACAACGA TTTCGGAG | 7078 |
| 2453 | GAAAGCCA G CAAGGAAA | 2881 | TTTCCTTG GGCTAGCTACAACGA TGGCTTTC | 7079 |
| 2461 | ACAAGGAA G UCCUCGAU | 2882 | ATCGAGGA GGCTAGCTACAACGA TTCCTTGT | 7080 |
| 2468 | AAUCCUCG G UGAAGCCU | 2883 | AGGCTTCA GGCTAGCTACAACGA CGAGGATT | 7081 |
| 2473 | UCGAUGAA G CCUACGUG | 2430 | CACGTAGG GGCTAGCTACAACGA TTCATCGA | 7082 |
| 2477 | UGAAGCCU G CGUGAUGG | 286 | CCATCACG GGCTAGCTACAACGA AGGCTTCA | 7083 |
| 2479 | AAGCCUAC G UGAUGGCC | 2431 | GGCCATCA GGCTAGCTACAACGA GTAGGCTT | 7084 |
| 2482 | CCUACGUG G UGGCCAGC | 2884 | GCTGGCCA GGCTAGCTACAACGA CACGTAGG | 7085 |
| 2485 | ACGUGAUG G CCAGCGUG | 2432 | CACGCTGG GGCTAGCTACAACGA CATCACGT | 7086 |
| 2489 | GAUGGCCA G CGUGGACA | 2433 | TGTCCACG GGCTAGCTACAACGA TGGCCATC | 7087 |
| 2491 | UGGCCAGC G UGGACAAC | 2434 | GTTGTCCA GGCTAGCTACAACGA GCTGGCCA | 7088 |
| 2495 | CAGCGUGG G CAACCCCC | 2885 | GGGGGTTG GGCTAGCTACAACGA CCACGCTG | 7089 |
| 2498 | CGUGGACA G CCCCCACG | 2886 | CGTGGGGG GGCTAGCTACAACGA TGTCCACG | 7090 |
| 2504 | CAACCCCC G CGUGUGCC | 1394 | GGCACACG GGCTAGCTACAACGA GGGGGTTG | 7091 |
| 2506 | ACCCCCAC G UGUGCCGC | 2435 | GCGGCACA GGCTAGCTACAACGA GTGGGGGT | 7092 |
| 2508 | CCCCACGU G UGCCGCCU | 2436 | AGGCGGCA GGCTAGCTACAACGA ACGTGGGG | 7093 |
| 2510 | CCACGUGU G CCGCCUGC | 2437 | GCAGGCGG GGCTAGCTACAACGA ACACGTGG | 7094 |
| 2513 | CGUGUGCC G CCUGCUGG | 2438 | CCAGCAGG GGCTAGCTACAACGA GGCACACG | 7095 |
| 2517 | UGCCGCCU G CUGGGCAU | 2439 | ATGCCCAG GGCTAGCTACAACGA AGGCGGCA | 7096 |
| 2522 | CCUGCUGG G CAUCUGCC | 2440 | GGCAGATG GGCTAGCTACAACGA CCAGCAGG | 7097 |
| 2524 | UGCUGGGC G UCUGCCUC | 1399 | GAGGCAGA GGCTAGCTACAACGA GCCCAGCA | 7098 |
| 2528 | GGGCAUCU G CCUCACCU | 2441 | AGGTGAGG GGCTAGCTACAACGA AGATGCCC | 7099 |
| 2533 | UCUGCCUC G CCUCCACC | 1403 | GGTGGAGG GGCTAGCTACAACGA GAGGCAGA | 7100 |
| 2539 | UCACCUCC G CCGUGCAA | 1407 | TTGCACGG GGCTAGCTACAACGA GGAGGTGA | 7101 |
| 2542 | CCUCCACC G UGCAACUC | 2442 | GAGTTGCA GGCTAGCTACAACGA GGTGGAGG | 7102 |
| 2544 | UCCACCGU G CAACUCAU | 2443 | ATGAGTTG GGCTAGCTACAACGA ACGGTGGA | 7103 |
| 2547 | ACCGUGCA G CUCAUCAC | 2887 | GTGATGAG GGCTAGCTACAACGA TGCACGGT | 7104 |
| 2551 | UGCAACUC G UCACGCAG | 1411 | CTGCGTGA GGCTAGCTACAACGA GAGTTGCA | 7105 |
| 2554 | AACUCAUC G CGCAGCUC | 1412 | GAGCTGCG GGCTAGCTACAACGA GATGAGTT | 7106 |
| 2556 | CUCAUCAC G CAGCUCAU | 2444 | ATGAGCTG GGCTAGCTACAACGA GTGATGAG | 7107 |
| 2559 | AUCACGCA G CUCAUGCC | 2445 | GGCATGAG GGCTAGCTACAACGA TGCGTGAT | 7108 |
| 2563 | CGCAGCUC G UGCCCUUC | 1415 | GAAGGGCA GGCTAGCTACAACGA GAGCTGCG | 7109 |
| 2565 | CAGCUCAU G CCCUUCGG | 2446 | CCGAAGGG GGCTAGCTACAACGA ATGAGCTG | 7110 |
| 2573 | GCCCUUCG G CUGCCUCC | 2447 | GGAGGCAG GGCTAGCTACAACGA CGAAGGGC | 7111 |
| 2576 | CUUCGGCU G CCUCCUGG | 2448 | CCAGGAGG GGCTAGCTACAACGA AGCCGAAG | 7112 |
| 2585 | CCUCCUGG G CUAUGUCC | 2888 | GGACATAG GGCTAGCTACAACGA CCAGGAGG | 7113 |
| 2588 | CCUGGACU G UGUCCGGG | 296 | CCCGGACA GGCTAGCTACAACGA AGTCCAGG | 7114 |
| 2590 | UGGACUAU G UCCGGGAA | 2449 | TTCCCGGA GGCTAGCTACAACGA ATAGTCCA | 7115 |
| 2598 | GUCCGGGA G CACAAAGA | 2889 | TCTTTGTG GGCTAGCTACAACGA TCCCGGAC | 7116 |
| 2600 | CCGGGAAC G CAAAGACA | 1426 | TGTCTTTG GGCTAGCTACAACGA GTTCCCGG | 7117 |
| 2606 | ACACAAAG G CAAUAUUG | 2890 | CAATATTG GGCTAGCTACAACGA CTTTGTGT | 7118 |
| 2609 | CAAAGACA G UAUUGGCU | 2891 | AGCCAATA GGCTAGCTACAACGA TGTCTTTG | 7119 |
| 2611 | AAGACAAU G UUGGCUCC | 298 | GGAGCCAA GGCTAGCTACAACGA ATTGTCTT | 7120 |
| 2615 | CAAUAUUG G CUCCCAGU | 2450 | ACTGGGAG GGCTAGCTACAACGA CAATATTG | 7121 |
| 2622 | GGCUCCCA G UACCUCCU | 2451 | AGCAGGTA GGCTAGCTACAACGA TGGGAGCC | 7122 |
| 2624 | CUCCCAGU G CCUGCUCA | 301 | TGAGCAGG GGCTAGCTACAACGA ACTGGGAG | 7123 |
| 2628 | CAGUACCU G CUCAACUG | 2452 | CAGTTGAG GGCTAGCTACAACGA AGGTACTG | 7124 |
| 2633 | CCUGCUCA G CUGGUGUG | 2892 | CACACCAG GGCTAGCTACAACGA TGAGCAGG | 7125 |
| 2637 | CUCAACUG G UGUGUGCA | 2453 | TGCACACA GGCTAGCTACAACGA CAGTTGAG | 7126 |
| 2639 | CAACUGGU G UGUGCAGA | 2454 | TCTGCACA GGCTAGCTACAACGA ACCAGTTG | 7127 |
| 2641 | ACUGGUGU G UGCAGAUC | 2455 | GATCTGCA GGCTAGCTACAACGA ACACCAGT | 7128 |
| 2643 | UGGUGUGU G CAGAUCGC | 2456 | GCGATCTG GGCTAGCTACAACGA ACACACCA | 7129 |
| 2647 | GUGUGCAG G UCGCAAAG | 2893 | CTTTGCGA GGCTAGCTACAACGA CTGCACAC | 7130 |
| 2650 | UGCAGAUC G CAAAGGGC | 2457 | GCCCTTTG GGCTAGCTACAACGA GATCTGCA | 7131 |
| 2657 | CGCAAAGG G CAUGAACU | 2458 | AGTTCATG GGCTAGCTACAACGA CCTTTGCG | 7132 |
| 2659 | CAAAGGGC G UGAACUAC | 1440 | GTAGTTCA GGCTAGCTACAACGA GCCCTTTG | 7133 |
| 2663 | GGGCAUGA G CUACUUGG | 2894 | CCAAGTAG GGCTAGCTACAACGA TCATGCCC | 7134 |
| 2666 | CAUGAACU G CUUGGAGG | 304 | CCTCCAAG GGCTAGCTACAACGA AGTTCATG | 7135 |
| 2675 | CUUGGAGG G CCGUCGCU | 2895 | AGCGACGG GGCTAGCTACAACGA CCTCCAAG | 7136 |
| 2678 | GGAGGACC G UCGCUUGG | 2459 | CCAAGCGA GGCTAGCTACAACGA GGTCCTCC | 7137 |
| 2681 | GGACCGUC G CUUGGUGC | 2460 | GCACCAAG GGCTAGCTACAACGA GACGGTCC | 7138 |
| 2686 | GUCGCUUG G UGCACCGC | 2461 | GCGGTGCA GGCTAGCTACAACGA CAAGCGAC | 7139 |
| 2688 | CGCUUGGU G CACCGCGA | 2462 | TCGCGGTG GGCTAGCTACAACGA ACCAAGCG | 7140 |
| 2690 | CUUGGUGC G CCGCGACC | 1445 | GGTCGCGG GGCTAGCTACAACGA GCACCAAG | 7141 |
| 2693 | GGUGCACC G CGACCUGG | 2463 | CCAGGTCG GGCTAGCTACAACGA GGTCCACC | 7142 |
| 2696 | GCACCGCG G CCUGGCAG | 2896 | CTGCCAGG GGCTAGCTACAACGA CGCGGTGC | 7143 |
| 2701 | GCGACCUG G CAGCCAGG | 2464 | CCTGCCTG GGCTAGCTACAACGA CACGTCGC | 7144 |
| 2704 | ACCUCGCA G CCAGGAAC | 2465 | GTTCCTGG GGCTAGCTACAACGA TGCCAGGT | 7145 |
| 2711 | AGCCAGGA G CGUACUGG | 2897 | CCAGTACG GGCTAGCTACAACGA TCCTGGCT | 7146 |
| 2713 | CCAGGAAC G UACUGGUG | 2466 | CACCAGTA GCCTAGCTACAACGA GTTCCTGG | 7147 |
| 2715 | AGGAACCU G CUGGUGAA | 308 | TTCACCAC GGCTAGCTACAACCA ACGTTCCT | 7148 |
| 2719 | ACGUACUG G UGAAAACA | 2467 | TGTTTTCA GGCTAGCTACAACGA CACTACGT | 7149 |
| 2725 | UGCUGAAA G CACCGCAC | 2898 | CTCCCCTC GGCTACCTACAACGA TTTCACCA | 7150 |
| 2727 | GUCAAAAC G CCGCAGCA | 1453 | TGCTGCGG GGCTAGCTACAACCA GTTTTCAC | 7151 |
| 2730 | AAAACACC G CAGCAUGU | 2468 | ACATGCTG GGCTAGCTACAACCA CCTGTTTT | 7152 |
| 2733 | ACACCGCA G CAUCUCAA | 2469 | TTGACATG GGCTAGCTACAACGA TGCGGTGT | 7153 |
| 2735 | ACCGCAGC G UGUCAAGA | 1456 | TCTTGACA GGCTACCTACAACGA GCTGCGGT | 7154 |
| 2737 | CGCACCAU G UCAAGAUC | 2470 | GATCTTGA GGCTAGCTACAACGA ATGCTGCC | 7155 |
| 2743 | AUGUCAAC G UCACAGAU | 2899 | ATCTGTCA GGCTAGCTACAACGA CTTGACAT | 7156 |
| 2746 | UCAACAUC G CAGAUUUU | 1458 | AAAATCTC GGCTACCTACAACGA GATCTTGA | 7157 |
| 2750 | GAUCACAG G UUUUCCCC | 2900 | GCCCAAAA GGCTAGCTACAACGA CTGTGATC | 7158 |
| 2757 | GAUUUUGC G CUCGCCAA | 2471 | TTGCCCAG GGCTAGCTACAACGA CCAAAATC | 7159 |
| 2761 | UUGGCCUG G CCAAACUG | 2472 | CAGTTTGG GGCTACCTACAACGA CAGCCCAA | 7160 |
| 2766 | CUGGCCAA G CUGCUGGG | 2901 | CCCAGCAG GGCTAGCTACAACCA TTCCCCAG | 7161 |
| 2769 | GCCAAACU G CUCCCUGC | 2473 | GCACCCAC GGCTAGCTACAACGA AGTTTGGC | 7162 |
| 2774 | ACUGCUGG G UGCGGAAC | 2474 | CTTCCGCA GGCTAGCTACAACGA CCAGCAGT | 7163 |
| 2776 | UGCUGGGU G CGCAAGAG | 2475 | CTCTTCCG GGCTAGCTACAACGA ACCCAGCA | 7164 |
| 2790 | CACAAACA G UACCAUCC | 2902 | GCATGGTA GGCTAGCTACAACGA TCTTTCTC | 7165 |
| 2792 | CAAACAAU G CCAUCCAC | 314 | CTCCATCC GGCTACCTACAACGA ATTCTTTC | 7166 |
| 2795 | AGAAUACC G UGCACAAC | 1466 | CTTCTCCA GGCTAGCTACAACGA GGTATTCT | 7167 |
| 2797 | AAUACCAU G CACAAGGA | 2476 | TCCTTCTG GGCTAGCTACAACGA ATGGTATT | 7168 |
| 2807 | ACAAGCAG G CAAACUGC | 2477 | CCACTTTC GGCTAGCTACAACGA CTCCTTCT | 7169 |
| 2812 | CAGCCAAA G UCCCUAUC | 2478 | CATACCCA GGCTACCTACAACGA TTTCCCTC | 7170 |
| 2814 | CCCAAACU G CCUAUCAA | 2479 | TTCATACC GGCTACCTACAACGA ACTTTCCC | 7171 |
| 2818 | AACUCCCU G UCAACUCC | 315 | CCACTTCA GGCTAGCTACAACGA ACCCACTT | 7172 |
| 2823 | CCUAUCAA G UCCAUGCC | 2480 | CCCATCCA GGCTACCTACAACGA TTCATACC | 7173 |
| 2827 | UCAACUCC G UCCCAUUG | 2903 | CAATGCCA GGCTACCTACAACGA CCACTTCA | 7174 |
| 2830 | AGUGGAUC G CAUUGGAA | 2481 | TTCCAATG GGCTAGCTACAACGA CATCCACT | 7175 |
| 2832 | UCCAUCCC G UUGGAAUC | 1472 | GATTCCAA GCCTACCTACAACCA CCCATCCA | 7176 |
| 2838 | GCAUUCCA G UCAAUUUU | 2904 | AAAATTGA GGCTAGCTACAACGA TCCAATCC | 7177 |
| 2842 | UGGAAUCA G UUUUACAC | 2905 | CTCTAAAA GGCTAGCTACAACGA TCATTCCA | 7178 |
| 2847 | UCAAUUUU G CACAGAAU | 322 | ATTCTGTG GGCTAGCTACAACGA AAAATTGA | 7179 |
| 2849 | AAUUUUAC G CAGAAUCU | 1474 | AGATTCTG GGCTAGCTACAACGA GTAAAATT | 7180 |
| 2854 | UACACAGA G UCUAUACC | 2906 | GGTATAGA GGCTAGCTACAACGA TCTGTGTA | 7181 |
| 2858 | CAGAAUCU G UACCCACC | 324 | GGTGGGTA GGCTAGCTACAACGA AGATTCTG | 7182 |
| 2860 | GAAUCUAU G CCCACCAG | 325 | CTGGTGGG GGCTAGCTACAACGA ATAGATTC | 7183 |
| 2864 | CUAUACCC G CCAGAGUG | 1479 | CACTCTGG GGCTAGCTACAACGA GGGTATAG | 7184 |
| 2870 | CCACCAGA G UGAUGUCU | 2482 | AGACATCA GGCTAGCTACAACGA TCTGGTGG | 7185 |
| 2873 | CCAGAGUG G UGUCUGGA | 2907 | TCCAGACA GGCTAGCTACAACGA CACTCTGG | 7186 |
| 2875 | AGAGUGAU G UCUGGAGC | 2483 | GCTCCAGA GGCTAGCTACAACGA ATCACTCT | 7187 |
| 2882 | UGUCUGGA G CUACGGGG | 2484 | CCCCGTAG GGCTAGCTACAACGA TCCAGACA | 7188 |
| 2885 | CUGGAGCU G CGGGGUGA | 327 | TCACCCCG GGCTAGCTACAACGA AGCTCCAG | 7189 |
| 2890 | GCUACGGG G UGACCGUU | 2485 | AACGGTCA GGCTAGCTACAACGA CCCGTAGC | 7190 |
| 2893 | ACGGGGUG G CCGUUUGG | 2908 | CCAAACGG GGCTAGCTACAACGA CACCCCGT | 7191 |
| 2896 | GGGUGACC G UUUGGGAG | 2486 | CTCCCAAA GGCTAGCTACAACGA GGTCACCC | 7192 |
| 2904 | GUUUGGGA G UUGAUGAC | 2487 | GTCATCAA GGCTAGCTACAACGA TCCCAAAC | 7193 |
| 2908 | GGGAGUUG G UGACCUUU | 2909 | AAAGGTCA GGCTAGCTACAACGA CAACTCCC | 7194 |
| 2911 | AGUUGAUG G CCUUUGGA | 2910 | TCCAAAGG GGCTAGCTACAACGA CATCAACT | 7195 |
| 2919 | ACCUUUGG G UCCAAGCC | 2911 | GGCTTGGA GGCTAGCTACAACGA CCAAAGGT | 7196 |
| 2925 | GGAUCCAA G CCAUAUGA | 2488 | TCATATGG GGCTAGCTACAACGA TTCGATCC | 7197 |
| 2928 | UCCAAGCC G UAUGACGG | 1490 | CCGTCATA GGCTAGCTACAACGA GGCTTGGA | 7198 |
| 2930 | CAAGCCAU G UGACGGAA | 334 | TTCCGTCA GGCTAGCTACAACGA ATGGCTTG | 7199 |
| 2933 | GCCAUAUG G CGGAAUCC | 2912 | GGATTCCG GGCTAGCTACAACGA CATATGGC | 7200 |
| 2938 | AUGACGGA G UCCCUGCC | 2913 | GGCAGGGA GGCTAGCTACAACGA TCCGTCAT | 7201 |
| 2944 | GAAUCCCU G CCAGCGAG | 2489 | CTCGCTGG GGCTAGCTACAACGA AGGGATTC | 7202 |
| 2948 | CCCUGCCA G CGAGAUCU | 2490 | AGATCTCG GGCTAGCTACAACGA TGGCAGGG | 7203 |
| 2953 | CCAGCGAG G UCUCCUCC | 2914 | GGAGGAGA GGCTAGCTACAACGA CTCGCTGG | 7204 |
| 2962 | UCUCCUCC G UCCUGGAG | 1500 | CTCCAGGA GGCTAGCTACAACGA GGAGGAGA | 7205 |
| 2979 | AAAGGAGA G CGCCUCCC | 2915 | GGGAGGCG GGCTAGCTACAACGA TCTCCTTT | 7206 |
| 2981 | AGGAGAAC G CCUCCCUC | 2491 | GAGGGAGG GGCTAGCTACAACGA GTTCTCCT | 7207 |
| 2991 | CUCCCUCA G CCACCCAU | 2492 | ATGGGTGG GGCTAGCTACAACGA TGAGGGAG | 7208 |
| 2994 | CCUCAGCC G CCCAUAUG | 1510 | CATATGGG GGCTAGCTACAACGA GGCTGAGG | 7209 |
| 2998 | AGCCACCC G UAUGUACC | 1513 | GGTACATA GGCTAGCTACAACGA GGGTGGCT | 7210 |
| 3000 | CCACCCAU G UGUACCAU | 342 | ATGGTACA GGCTAGCTACAACGA ATGGGTGG | 7211 |
| 3002 | ACCCAUAU G UACCAUCG | 2493 | CGATGGTA GGCTAGCTACAACGA ATATGGGT | 7212 |
| 3004 | CCAUAUGU G CCAUCGAU | 343 | ATCGATGG GGCTAGCTACAACGA ACATATGG | 7213 |
| 3007 | UAUGUACC G UCGAUGUC | 1515 | GACATCGA GGCTAGCTACAACGA GGTACATA | 7214 |
| 3011 | UACCAUCG G UGUCUACA | 2916 | TGTAGACA GGCTAGCTACAACGA CGATGGTA | 7215 |
| 3013 | CCAUCGAU G UCUACAUG | 2494 | CATGTAGA GGCTAGCTACAACGA ATCGATGG | 7216 |
| 3017 | CGAUGUCU G CAUGAUCA | 346 | TGATCATG GGCTAGCTACAACGA AGACATCG | 7217 |
| 3019 | AUGUCUAC G UGAUCAUG | 1517 | CATGATCA GGCTAGCTACAACGA GTAGACAT | 7218 |
| 3022 | UCUACAUG G UCAUGGUC | 2917 | GACCATGA GGCTAGCTACAACGA CATGTAGA | 7219 |
| 3025 | ACAUGAUC G UGGUCAAG | 1518 | CTTGACCA GGCTAGCTACAACGA GATCATGT | 7220 |
| 3028 | UGAUCAUG G UCAAGUGC | 2495 | GCACTTGA GGCTAGCTACAACGA CATGATCA | 7221 |
| 3033 | AUGGUCAA G UGCUGGAU | 2496 | ATCCAGCA GGCTAGCTACAACGA TTGACCAT | 7222 |
| 3035 | GGUCAAGU G CUGGAUGA | 2497 | TCATCCAG GGCTAGCTACAACGA ACTTGACC | 7223 |
| 3040 | AGUGCUGG G UGAUAGAC | 2918 | GTCTATCA GGCTAGCTACAACGA CCAGCACT | 7224 |
| 3043 | GCUGGAUG G UAGACGCA | 2919 | TGCGTCTA GGCTAGCTACAACGA CATCCAGC | 7225 |
| 3047 | GAUGAUAG G CGCAGAUA | 2920 | TATCTGCG GGCTAGCTACAACGA CTATCATC | 7226 |
| 3049 | UGAUAGAC G CAGAUAGU | 2498 | ACTATCTG GGCTAGCTACAACGA GTCTATCA | 7227 |
| 3053 | AGACGCAG G UAGUCGCC | 2921 | GGCGACTA GGCTAGCTACAACGA CTGCGTCT | 7228 |
| 3056 | CGCAGAUA G UCGCCCAA | 2499 | TTGGGCGA GGCTAGCTACAACGA TATCTGCG | 7229 |
| 3059 | AGAUAGUC G CCCAAAGU | 2500 | ACTTTGGG GGCTAGCTACAACGA GACTATCT | 7230 |
| 3066 | CGCCCAAA G UUCCGUGA | 2501 | TCACGGAA GGCTAGCTACAACGA TTTGGGCG | 7231 |
| 3071 | AAAGUUCC G UGAGUUGA | 2502 | TCAACTCA GGCTAGCTACAACGA GGAACTTT | 7232 |
| 3075 | UUCCGUGA G UUGAUCAU | 2503 | ATGATCAA GGCTAGCTACAACGA TCACGGAA | 7233 |
| 3079 | GUGAGUUG G UCAUCGAA | 2922 | TTCGATGA GGCTAGCTACAACGA CAACTCAC | 7234 |
| 3082 | AGUUGAUC G UCGAAUUC | 1526 | GAATTCGA GGCTAGCTACAACGA GATCAACT | 7235 |
| 3087 | AUCAUCGA G UUCUCCAA | 2923 | TTGGAGAA GGCTAGCTACAACGA TCGATGAT | 7236 |
| 3097 | UCUCCAAA G UGGCCCGA | 2924 | TCGGGCCA GGCTAGCTACAACGA TTTGGAGA | 7237 |
| 3100 | CCAAAAUG G CCCGAGAC | 2504 | GTCTCGGG GGCTAGCTACAACGA CATTTTGG | 7238 |
| 3107 | GGCCCGAG G CCCCCAGC | 2925 | GCTGGGGG GGCTAGCTACAACGA CTCGGGCC | 7239 |
| 3114 | GACCCCCA G CGCUACCU | 2505 | AGGTAGCG GGCTAGCTACAACGA TGGGGGTC | 7240 |
| 3116 | CCCCCAGC G CUACCUUG | 2506 | CAAGGTAG GGCTAGCTACAACGA GCTGGGGG | 7241 |
| 3119 | CCAGCGCU G CCUUGUCA | 360 | TGACAAGG GGCTAGCTACAACGA AGCGCTGG | 7242 |
| 3124 | GCUACCUU G UCAUUCAG | 2507 | CTGAATGA GGCTAGCTACAACGA AAGGTAGC | 7243 |
| 3127 | ACCUUGUC G UUCAGGGG | 1540 | CCCCTGAA GGCTAGCTACAACGA GACAAGGT | 7244 |
| 3137 | UCAGGGGG G UGAAAGAA | 2926 | TTCTTTCA GGCTAGCTACAACGA CCCCCTGA | 7245 |
| 3145 | AUGAAAGA G UGCAUUUG | 2927 | CAAATGCA GGCTAGCTACAACGA TCTTTCAT | 7246 |
| 3147 | GAAAGAAU G CAUUUGCC | 2508 | GGCAAATG GGCTAGCTACAACGA ATTCTTTC | 7247 |
| 3149 | AAGAAUGC G UUUGCCAA | 1542 | TTGGCAAA GGCTAGCTACAACGA GCATTCTT | 7248 |
| 3153 | AUGCAUUU G CCAAGUCC | 2509 | GGACTTGG GGCTAGCTACAACGA AAATGCAT | 7249 |
| 3158 | UUUGCCAA G UCCUACAG | 2510 | CTGTAGGA GGCTAGCTACAACGA TTGGCAAA | 7250 |
| 3163 | CAAGUCCU G CAGACUCC | 368 | GGAGTCTG GGCTAGCTACAACGA AGGACTTG | 7251 |
| 3167 | UCCUACAG G CUCCAACU | 2928 | AGTTGGAG GGCTAGCTACAACGA CTGTAGGA | 7252 |
| 3173 | AGACUCCA G CUUCUACC | 2929 | GGTAGAAG GGCTAGCTACAACGA TGGAGTCT | 7253 |
| 3179 | CAACUUCU G CCGUGCCC | 372 | GGGCACGG GGCTAGCTACAACGA AGAAGTTG | 7254 |
| 3182 | CUUCUACC G UGCCCUGA | 2511 | TCAGGGCA GGCTAGCTACAACGA GGTAGAAG | 7255 |
| 3184 | UCUACCGU G CCCUGAUG | 2512 | CATCAGGG GGCTAGCTACAACGA ACGGTAGA | 7256 |
| 3190 | GUGCCCUG G UGGAUGAA | 2930 | TTCATCCA GGCTAGCTACAACGA CAGGGCAC | 7257 |
| 3194 | CCUGAUGG G UGAAGAAG | 2931 | CTTCTTCA GGCTAGCTACAACGA CCATCAGG | 7258 |
| 3203 | UGAAGAAG G CAUGGACG | 2932 | CGTCCATG GGCTAGCTACAACGA CTTCTTCA | 7259 |
| 3205 | AAGAAGAC G UGGACGAC | 1557 | GTCGTCCA GGCTAGCTACAACGA GTCTTCTT | 7260 |
| 3209 | AGACAUGG G CGACGUGG | 2933 | CCACGTCG GGCTAGCTACAACGA CCATGTCT | 7261 |
| 3212 | CAUGGACG G CGUGGUGG | 2934 | CCACCACG GGCTAGCTACAACGA CGTCCATG | 7262 |
| 3214 | UGGACGAC G UGGUGGAU | 2513 | ATCCACCA GGCTAGCTACAACGA GTCGTCCA | 7263 |
| 3217 | ACGACGUG G UGGAUGCC | 2514 | GGCATCCA GGCTAGCTACAACGA CACGTCGT | 7264 |
| 3221 | CGUGGUGG G UGCCGACG | 2935 | CGTCGGCA GGCTAGCTACAACGA CCACCACG | 7265 |
| 3223 | UGGUGGAU G CCGACGAG | 2515 | CTCGTCGG GGCTAGCTACAACGA ATCCACCA | 7266 |
| 3227 | GGAUGCCG G CGAGUACC | 2936 | GGTACTCG GGCTAGCTACAACGA CGGCATCC | 7267 |
| 3231 | GCCGACGA G UACCUCAU | 2516 | ATGAGGTA GGCTAGCTACAACGA TCGTCGGC | 7268 |
| 3233 | CGACGAGU G CCUCAUCC | 373 | GGATGAGG GGCTAGCTACAACGA ACTCGTCG | 7269 |
| 3238 | AGUACCUC G UCCCACAG | 1561 | CTGTGGGA GGCTAGCTACAACGA GAGGTACT | 7270 |
| 3243 | CUCAUCCC G CAGCAGGG | 1564 | CCCTGCTG GGCTAGCTACAACGA GGGATGAG | 7271 |
| 3246 | AUCCCACA G CAGGGCUU | 2517 | AAGCCCTG GGCTAGCTACAACGA TGTGGGAT | 7272 |
| 3251 | ACAGCAGG G CUUCUUCA | 2518 | TGAAGAAG GGCTAGCTACAACGA CCTGCTGT | 7273 |
| 3260 | CUUCUUCA G CAGCCCCU | 2519 | AGGGGCTG GGCTAGCTACAACGA TGAAGAAG | 7274 |
| 3263 | CUUCAGCA G CCCCUCCA | 2520 | TGGAGGCG GGCTAGCTACAACGA TGCTGAAG | 7275 |
| 3271 | GCCCCUCC G CGUCACGG | 1576 | CCGTGACG GGCTAGCTACAACGA CGAGGGGC | 7276 |
| 3273 | CCCUCCAC G UCACGGAC | 2521 | GTCCGTGA GGCTAGCTACAACGA GTGGAGGG | 7277 |
| 3276 | UCCACGUC G CGGACUCC | 1577 | GGAGTCCG GGCTAGCTACAACGA GACGTGGA | 7278 |
| 3280 | CGUCACGG G CUCCCCUC | 2937 | GAGGGGAG GGCTAGCTACAACGA CCGTGACG | 7279 |
| 3293 | CCUCCUGA G CUCUCUGA | 2522 | TCAGAGAG GGCTAGCTACAACGA TCAGGAGG | 7280 |
| 3302 | CUCUCUGA G UGCAACCA | 2523 | TGGTTGCA GGCTAGCTACAACGA TCAGAGAG | 7281 |
| 3304 | CUCUGAGU G CAACCAGC | 2524 | GCTGGTTG GGCTAGCTACAACGA ACTCAGAG | 7282 |
| 3307 | UGAGUGCA G CCAGCAAC | 2938 | GTTGCTGG GGCTAGCTACAACGA TGCACTCA | 7283 |
| 3311 | UGCAACCA G CAACAAUU | 2525 | AATTGTTG GGCTAGCTACAACGA TGGTTGCA | 7284 |
| 3314 | AACCAGCA G CAAUUCCA | 2939 | TGGAATTG GGCTAGCTACAACGA TGCTGGTT | 7285 |
| 3317 | CAGCAACA G UUCCACCG | 2940 | CGGTGGAA GGCTAGCTACAACGA TGTTGCTG | 7286 |
| 3322 | ACAAUUCC G CCGUGGCU | 1594 | AGCCACGG GGCTAGCTACAACGA GGAATTGT | 7287 |
| 3325 | AUUCCACC G UGGCUUGC | 2526 | GCAAGCCA GGCTAGCTACAACGA GGTGGAAT | 7288 |
| 3328 | CCACCGUG G CUUGCAUU | 2527 | AATGCAAG GGCTAGCTACAACGA CACGGTGG | 7289 |
| 3332 | CGUGGCUU G CAUUGAUA | 2528 | TATCAATG GGCTAGCTACAACGA AAGCCACG | 7290 |
| 3334 | UGGCUUGC G UUGAUAGA | 1597 | TCTATCAA GGCTAGCTACAACGA GCAAGCCA | 7291 |
| 3338 | UUGCAUUG G UAGAAAUG | 2941 | CATTTCTA GGCTAGCTACAACGA CAATGCAA | 7292 |
| 3344 | UGAUAGAA G UGGGCUGC | 2942 | GCAGCCCA GGCTAGCTACAACGA TTCTATCA | 7293 |
| 3348 | AGAAAUGG G CUGCAAAG | 2529 | CTTTGCAG GGCTAGCTACAACGA CCATTTCT | 7294 |
| 3351 | AAUGGGCU G CAAAGCUG | 2530 | CAGCTTTG GCCTAGCTACAACGA AGCCCATT | 7295 |
| 3356 | GCUGCAAA G CUGUCCCA | 2531 | TGGGACAG GGCTAGCTACAACGA TTTGCAGC | 7296 |
| 3359 | GCAAACCU G UCCCAUCA | 2532 | TGATGGGA GGCTAGCTACAACGA AGCTTTGC | 7297 |
| 3364 | GCUGUCCC G UCAAGGAA | 1603 | TTCCTTGA GGCTAGCTACAACGA GGGACAGC | 7298 |
| 3374 | CAAGGAAG G CAGCUUCU | 2943 | AGAAGCTG GGCTAGCTACAACGA CTTCCTTG | 7299 |
| 3377 | GGAAGACA G CUUCUUGC | 2533 | GCAAGAAG GGCTAGCTACAACGA TGTCTTCC | 7300 |
| 3384 | AGCUUCUU G CAGCGAUA | 2534 | TATCGCTG GCCTAGCTACAACGA AAGAACCT | 7301 |
| 3387 | UUCUUCCA G CGAUACAG | 2535 | CTGTATCC GGCTAGCTACAACGA TGCAAGAA | 7302 |
| 3390 | UUGCAGCG G UACAGCUC | 2944 | GACCTGTA GGCTAGCTACAACGA CGCTGCAA | 7303 |
| 3392 | GCAGCCAU G CAGCUCAC | 396 | CTCACCTG GCCTACCTACAACGA ATCGCTCC | 7304 |
| 3395 | GCGAUACA G CUCAGACC | 2536 | GCTCTCAC GGCTAGCTACAACCA TCTATCCC | 7305 |
| 3401 | CAGCUCAC G CCCCACAC | 2945 | CTGTGGCG GCCTAGCTACAACGA CTCACCTC | 7306 |
| 3406 | CACACCCC G CACGCGCC | 1615 | CGCCCCTG GCCTAGCTACAACGA CCCGTCTC | 7307 |
| 3410 | CCCCACAC G CGCCUUGA | 2537 | TCAAGCCC GCCTACCTACAACGA CTCTCCCC | 7308 |
| 3412 | CCACAGGC G CCUUCACU | 2538 | AGTCAAGG GGCTAGCTACAACGA GCCTGTCG | 7309 |
| 3418 | CCCCCUUG G CUCACCAC | 2946 | CTCCTCAG GGCTACCTACAACCA CAACGCGC | 7310 |
| 3425 | GACUGACG G CAGCAUAG | 2947 | CTATGCTC GGCTAGCTACAACGA CCTCAGTC | 7311 |
| 3428 | UCAGGACA G CAUAGACG | 2539 | CCTCTATC GGCTAGCTACAACGA TGTCCTCA | 7312 |
| 3430 | AGCACACC G UAGACCAC | 1621 | GTCGTCTA GGCTAGCTACAACGA GCTGTCCT | 7313 |
| 3434 | CACCAUAG G CGACACCU | 2948 | ACCTGTCC GCCTAGCTACAACGA CTATGCTC | 7314 |
| 3437 | CAUACACC G CACCUUCC | 2949 | CCAAGGTG GCCTAGCTACAACGA CGTCTATG | 7315 |
| 3439 | UAGACGAC G CCUUCCUC | 1622 | GACCAACC GCCTAGCTACAACGA GTCGTCTA | 7316 |
| 3451 | UCCUCCCA G UCCCUCAA | 2540 | TTCAGGCA GGCTAGCTACAACGA TCCGAGGA | 7317 |
| 3453 | CUCCCACU G CCUGAAUA | 2541 | TATTCAGG GGCTAGCTACAACGA ACTCGGAC | 7318 |
| 3459 | GUCCCUCA G UACAUAAA | 2950 | TTTATGTA GGCTAGCTACAACGA TCACGCAC | 7319 |
| 3461 | GCCUCAAU G CAUAAACC | 403 | GGTTTATC GCCTACCTACAACGA ATTCAGGC | 7320 |
| 3463 | CUCAAUAC G UAAACCAG | 1632 | CTGGTTTA GCCTAGCTACAACGA GTATTCAG | 7321 |
| 3467 | AUACAUAA G CCACUCCC | 2951 | CCGACTCC GCCTAGCTACAACGA TTATGTAT | 7322 |
| 3471 | AUAAACCA G UCCCUUCC | 2542 | CCAACCCA GGCTAGCTACAACGA TCCTTTAT | 7323 |
| 3475 | ACCACUCC G UUCCCAAA | 2543 | TTTCCCAA GCCTACCTACAACGA CCACTCCT | 7324 |
| 3486 | CCCAAAAC G CCCCCUCC | 2544 | CCACCCGG GCCTAGCTACAACGA CTTTTCCG | 7325 |
| 3490 | AAAGCCCC G CUCCCUCU | 2545 | ACACCCAC GCCTACCTACAACGA CCCCCTTT | 7326 |
| 3494 | GCCCGCUG G CUCUCUCC | 2546 | GCACACAG GGCTAGCTACAACGA CAGCGGGC | 7327 |
| 3499 | CUCCCUCU G UGCACAAU | 2547 | ATTCTCCA GCCTACCTACAACGA ACACCCAC | 7328 |
| 3501 | CCCUCUGU G CACAAUCC | 2548 | CGATTCTC GCCTACCTACAACGA ACACACCC | 7329 |
| 3506 | UCUCCAGA G UCCUCUCU | 2952 | AGACACCA GCCTACCTACAACGA TCTCCACA | 7330 |
| 3511 | ACAAUCCU G UCUAUCAC | 2549 | CTCATACA GCCTACCTACAAGCA ACCATTCT | 7331 |
| 3515 | UCCUGUCU G UCACAAUC | 411 | GATTGTGA GGCTAGCTACAACGA AGACAGGA | 7332 |
| 3518 | UGUCUAUC G CAAUCAGC | 1648 | GCTGATTG GGCTAGCTACAACGA GATAGACA | 7333 |
| 3521 | CUAUCACA G UCAGCCUC | 2953 | GAGGCTGA GGCTAGCTACAACGA TGTGATAG | 7334 |
| 3525 | CACAAUCA G CCUCUGAA | 2550 | TTCAGAGG GGCTAGCTACAACGA TGATTGTG | 7335 |
| 3533 | GCCUCUGA G CCCCGCGC | 2954 | GCGCGGGG GGCTAGCTACAACGA TCAGAGGC | 7336 |
| 3538 | UGAACCCC G CGCCCAGC | 2551 | GCTGGGCG GGCTAGCTACAACGA GGGGTTCA | 7337 |
| 3540 | AACCCCGC G CCCAGCAG | 2552 | CTGCTGGG GGCTAGCTACAACGA GCGGGGTT | 7338 |
| 3545 | CGCGCCCA G CAGAGACC | 2553 | GGTCTCTG GGCTAGCTACAACGA TGGGCGCG | 7339 |
| 3551 | CAGCAGAG G CCCACACU | 2955 | AGTGTGGG GGCTAGCTACAACGA CTCTGCTG | 7340 |
| 3555 | AGAGACCC G CACUACCA | 1663 | TGGTAGTG GGCTAGCTACAACGA GGGTCTCT | 7341 |
| 3557 | AGACCCAC G CUACCAGG | 1664 | CCTGGTAG GGCTAGCTACAACGA GTGGGTCT | 7342 |
| 3560 | CCCACACU G CCAGGACC | 415 | GGTCCTGG GGCTAGCTACAACGA AGTGTGGG | 7343 |
| 3566 | CUACCAGG G CCCCCACA | 2956 | TGTGGGGG GGCTAGCTACAACGA CCTGGTAG | 7344 |
| 3572 | GGACCCCC G CAGCACUG | 1672 | CAGTGCTG GGCTAGCTACAACGA GGGGGTCC | 7345 |
| 3575 | CCCCCACA G CACUGCAG | 2554 | CTGCAGTG GGCTAGCTACAACGA TGTGGGGG | 7346 |
| 3577 | CCCACAGC G CUGCAGUG | 1674 | CACTGCAG GGCTAGCTACAACGA GCTGTGGG | 7347 |
| 3580 | ACAGCACU G CAGUGGGC | 2555 | GCCCACTG GGCTAGCTACAACGA AGTGCTGT | 7348 |
| 3583 | GCACUGCA G UGGGCAAC | 2556 | GTTGCCCA GGCTAGCTACAACGA TGCAGTGC | 7349 |
| 3587 | UGCAGUGG G CAACCCCG | 2557 | CGGGGTTG GGCTAGCTACAACGA CCACTGCA | 7350 |
| 3590 | AGUGGGCA G CCCCGAGU | 2957 | ACTCGGGG GGCTAGCTACAACGA TGCCCACT | 7351 |
| 3597 | AACCCCGA G UAUCUCAA | 2558 | TTGAGATA GGCTAGCTACAACGA TCGGGGTT | 7352 |
| 3599 | CCCCGAGU G UCUCAACA | 416 | TGTTGAGA GGCTAGCTACAACGA ACTCGGGG | 7353 |
| 3605 | GUAUCUCA G CACUGUCC | 2958 | GGACAGTG GGCTAGCTACAACGA TGAGATAC | 7354 |
| 3607 | AUCUCAAC G CUGUCCAG | 1683 | CTGGACAG GGCTAGCTACAACGA GTTGAGAT | 7355 |
| 3610 | UCAACACU G UCCAGCCC | 2559 | GGGCTGGA GGCTAGCTACAACGA AGTGTTGA | 7356 |
| 3615 | ACUGUCCA G CCCACCUG | 2560 | CAGGTGGG GGCTAGCTACAACGA TGGACAGT | 7357 |
| 3619 | UCCAGCCC G CCUGUGUC | 1689 | GACACAGG GGCTAGCTACAACGA GGGCTGGA | 7358 |
| 3623 | GCCCACCU G UGUCAACA | 2561 | TGTTGACA GGCTAGCTACAACGA AGGTGGGC | 7359 |
| 3625 | CCACCUGU G UCAACAGC | 2562 | GCTGTTGA GGCTAGCTACAACGA ACAGGTGG | 7360 |
| 3629 | CUGUGUCA G CAGCACAU | 2959 | ATGTGCTG GGCTAGCTACAACGA TGACACAG | 7361 |
| 3632 | UGUCAACA G CACAUUCG | 2563 | CGAATGTG GGCTAGCTACAACGA TGTTGACA | 7362 |
| 3634 | UCAACAGC G CAUUCGAC | 1694 | GTCGAATG GGCTAGCTACAACGA GCTGTTGA | 7363 |
| 3636 | AACAGCAC G UUCGACAG | 1695 | CTGTCGAA GGCTAGCTACAACGA GTGCTGTT | 7364 |
| 3641 | CACAUUCG G CAGCCCUG | 2960 | CAGGGCTG GGCTAGCTACAACGA CGAATGTG | 7365 |
| 3644 | AUUCGACA G CCCUGCCC | 2564 | GGGCAGGG GGCTAGCTACAACGA TGTCGAAT | 7366 |
| 3649 | ACAGCCCU G CCCACUGG | 2565 | CCAGTGGG GGCTAGCTACAACGA AGGGCTGT | 7367 |
| 3653 | CCCUGCCC G CUGGGCCC | 1702 | GGGCCCAG GGCTAGCTACAACGA GGGCAGGG | 7368 |
| 3658 | CCCACUGG G CCCAGAAA | 2566 | TTTCTGGG GGCTAGCTACAACGA CCAGTGGG | 7369 |
| 3668 | CCAGAAAG G CAGCCACC | 2567 | GGTGGCTG GGCTAGCTACAACGA CTTTCTGG | 7370 |
| 3671 | GAAAGGCA G CCACCAAA | 2568 | TTTGGTGG GGCTAGCTACAACGA TGCCTTTC | 7371 |
| 3674 | AGGCAGCC G CCAAAUUA | 1709 | TAATTTGG GGCTAGCTACAACGA GGCTGCCT | 7372 |
| 3679 | GCCACCAA G UUAGCCUG | 2961 | CAGGCTAA GGCTAGCTACAACGA TTGGTGGC | 7373 |
| 3683 | CCAAAUUA G CCUGGACA | 2569 | TGTCCAGG GGCTAGCTACAACGA TAATTTGG | 7374 |
| 3689 | UAGCCUGG G CAACCCUG | 2962 | CAGGGTTG GGCTAGCTACAACGA CCAGGCTA | 7375 |
| 3692 | CCUGGACA G CCCUGACU | 2963 | AGTCAGGG GGCTAGCTACAACGA TGTCCAGG | 7376 |
| 3698 | CAACCCUG G CUACCAGC | 2964 | GCTGGTAG GGCTAGCTACAACGA CAGGGTTG | 7377 |
| 3701 | CCCUGACU G CCAGCAGG | 425 | CCTGCTGG GGCTAGCTACAACGA AGTCAGGG | 7378 |
| 3705 | GACUACCA G CAGGACUU | 2570 | AAGTCCTG GGCTAGCTACAACGA TGGTAGTC | 7379 |
| 3710 | CCAGCAGG G CUUCUUUC | 2965 | GAAAGAAG GGCTAGCTACAACGA CCTGCTGG | 7380 |
| 3727 | CCAAGGAA G CCAAGCCA | 2571 | TGGCTTGG GGCTAGCTACAACGA TTCCTTGG | 7381 |
| 3732 | GAAGCCAA G CCAAAUGG | 2572 | CCATTTGG GGCTAGCTACAACGA TTGGCTTC | 7382 |
| 3737 | CAAGCCAA G UGGCAUCU | 2966 | AGATGCCA GGCTAGCTACAACGA TTGGCTTG | 7383 |
| 3740 | GCCAAAUG G CAUCUUUA | 2573 | TAAAGATG GGCTAGCTACAACGA CATTTGGC | 7384 |
| 3742 | CAAAUGGC G UCUUUAAG | 1731 | CTTAAAGA GGCTAGCTACAACGA GCCATTTG | 7385 |
| 3752 | CUUUAAGG G CUCCACAG | 2574 | CTGTGGAG GGCTAGCTACAACGA CCTTAAAG | 7386 |
| 3757 | AGGGCUCC G CAGCUGAA | 1735 | TTCAGCTG GGCTAGCTACAACGA GGAGCCCT | 7387 |
| 3760 | GCUCCACA G CUGAAAAU | 2575 | ATTTTCAG GGCTAGCTACAACGA TGTGGAGC | 7388 |
| 3767 | AGCUGAAA G UGCAGAAU | 2967 | ATTCTGCA GGCTAGCTACAACGA TTTCAGCT | 7389 |
| 3769 | CUGAAAAU G CAGAAUAC | 2576 | GTATTCTG GGCTAGCTACAACGA ATTTTCAG | 7390 |
| 3774 | AAUGCAGA G UACCUAAG | 2968 | CTTAGGTA GGCTAGCTACAACGA TCTGCATT | 7391 |
| 3776 | UGCAGAAU G CCUAAGGG | 436 | CCCTTAGG GGCTAGCTACAACGA ATTCTGCA | 7392 |
| 3784 | ACCUAAGG G UCGCGCCA | 2577 | TGGCGCGA GGCTAGCTACAACGA CCTTAGGT | 7393 |
| 3787 | UAAGGGUC G CGCCACAA | 2578 | TTGTGGCG GGCTAGCTACAACGA GACCCTTA | 7394 |
| 3789 | AGGGUCGC G CCACAAAG | 2579 | CTTTGTGG GGCTAGCTACAACGA GCGACCCT | 7395 |
| 3792 | GUCGCGCC G CAAAGCAG | 1742 | CTGCTTTG GGCTAGCTACAACGA GGCGCGAC | 7396 |
| 3797 | GCCACAAA G CAGUGAAU | 2580 | ATTCACTG GGCTAGCTACAACGA TTTGTGGC | 7397 |
| 3800 | ACAAAGCA G UGAAUUUA | 2581 | TAAATTCA GGCTAGCTACAACGA TGCTTTGT | 7398 |
| 3804 | AGCAGUGA G UUUAUUGG | 2969 | CCAATAAA GGCTAGCTACAACGA TCACTGCT | 7399 |
| 3808 | GUGAAUUU G UUGGAGCA | 441 | TGCTCCAA GGCTAGCTACAACGA AAATTCAC | 7400 |
| 3814 | UUAUUGGA G CAUGACCA | 2582 | TGGTCATG GGCTAGCTACAACGA TCCAATAA | 7401 |
| 3816 | AUUGGAGC G UGACCACG | 1745 | CGTGGTCA GGCTAGCTACAACGA GCTCCAAT | 7402 |
| 3819 | GGAGCAUG G CCACGGAG | 2970 | CTCCGTGG GGCTAGCTACAACGA CATGCTCC | 7403 |
| 3822 | GCAUGACC G CGGAGGAU | 1747 | ATCCTCCG GGCTAGCTACAACGA GGTCATGC | 7404 |
| 3829 | CACGGAGG G UAGUAUGA | 2971 | TCATACTA GGCTAGCTACAACGA CCTCCGTG | 7405 |
| 3832 | GGAGGAUA G UAUGAGCC | 2583 | GGCTCATA GGCTAGCTACAACGA TATCCTCC | 7406 |
| 3834 | AGGAUAGU G UGAGCCCU | 444 | AGGGCTCA GGCTAGCTACAACGA ACTATCCT | 7407 |
| 3838 | UAGUAUGA G CCCUAAAA | 2584 | TTTTAGGG GGCTAGCTACAACGA TCATACTA | 7408 |
| 3847 | CCCUAAAA G UCCAGACU | 2972 | AGTCTGGA GGCTAGCTACAACGA TTTTAGGU | 7409 |
| 3853 | AAAUCCAG G CUCUUUCG | 2973 | CGAAAGAG GGCTAGCTACAACGA CTGGATTT | 7410 |
| 3862 | CUCUUUCG G UACCCAGG | 2974 | CCTGGGTA GGCTAGCTACAACGA CGAAAGAG | 7411 |
| 3864 | CUUUCGAU G CCCAGGAC | 451 | GTCCTGGG GGCTAGCTACAACGA ATCGAAAG | 7412 |
| 3871 | UACCCAGG G CCAAGCCA | 2975 | TGGCTTGG GGCTAGCTACAACGA CCTGGGTA | 7413 |
| 3876 | AGGACCAA G CCACAGCA | 2585 | TGCTGTGG GGCTAGCTACAACGA TTGGTCCT | 7414 |
| 3879 | ACCAAGCC G CAGCAGGU | 1761 | ACCTGCTG GGCTAGCTACAACGA GGCTTGGT | 7415 |
| 3882 | AAGCCACA G CAGGUCCU | 2586 | AGGACCTG GGCTAGCTACAACGA TGTGGCTT | 7416 |
| 3886 | CACAGCAG G UCCUCCAU | 2587 | ATGGAGGA GGCTAGCTACAACGA CTGCTGTG | 7417 |
| 3893 | GGUCCUCC G UCCCAACA | 1767 | TGTTGGGA GGCTAGCTACAACGA GGAGGACC | 7418 |
| 3899 | CCAUCCCA G CAGCCAUG | 2976 | CATGGCTG GGCTAGCTACAACGA TGGGATGG | 7419 |
| 3902 | UCCCAACA G CCAUGCCC | 2588 | GGGCATGG GGCTAGCTACAACGA TGTTGGGA | 7420 |
| 3905 | CAACAGCC G UGCCCGCA | 1773 | TGCGGGCA GGCTAGCTACAACGA GGCTGTTG | 7421 |
| 3907 | ACAGCCAU G CCCGCAUU | 2589 AATGCGGG GGCTAGCTACAACGA ATGGCTGT | 7422 | |
| 3911 | CCAUGCCC G CAUUAGCU | 2590 | AGCTAATG GGCTAGCTACAACGA GGGCATGG | 7423 |
| 3913 | AUGCCCGC G UUAGCUCU | 1776 | AGAGCTAA GGCTAGCTACAACGA GCGGGCAT | 7424 |
| 3917 | CCGCAUUA G CUCUUAGA | 2591 TCTAAGAG GGCTAGCTACAACGA TAATGCGG | 7425 | |
| 3925 | GCUCUUAG G CCCACAGA | 2977 | TCTGTGGG GGCTAGCTACAACGA CTAAGAGC | 7426 |
| 3929 | UUAGACCC G CAGACUGG | 1781 | CCAGTCTG GGCTAGCTACAACGA GGGTCTAA | 7427 |
| 3933 | ACCCACAG G CUGGUUUU | 2978 | AAAACCAG GGCTAGCTACAACGA CTGTGGGT | 7428 |
| 3937 | ACAGACUG G UUUUGCAA | 2592 | TTGCAAAA GGCTAGCTACAACGA CAGTCTGT | 7429 |
| 3942 | CUGGUUUU G CAACGUUU | 2593 | AAACGTTG GGCTAGCTACAACGA AAAACCAG | 7430 |
| 3945 | GUUUUGCA G CGUUUACA | 2979 | TGTAAACG GGCTAGCTACAACGA TGCAAAAC | 7431 |
| 3947 | UUUGCAAC G UUUACACC | 2594 | GGTGTAAA GGCTAGCTACAACGA GTTGCAAA | 7432 |
| 3951 | CAACGUUU G CACCGACU | 465 | AGTCGGTG GGCTAGCTACAACGA AAACGTTG | 7433 |
| 3953 | ACGUUUAC G CCGACUAG | 1785 | CTAGTCGG GGCTAGCTACAACGA GTAAACGT | 7434 |
| 3957 | UUACACCG G CUAGCCAG | 2980 | CTGGCTAG GGCTAGCTACAACGA CGGTGTAA | 7435 |
| 3961 | ACCGACUA G CCAGGAAG | 2595 | CTTCCTGG GGCTAGCTACAACGA TAGTCGGT | 7436 |
| 3969 | GCCAGGAA G UACUUCCA | 2596 | TGGAAGTA GGCTAGCTACAACGA TTCCTGGC | 7437 |
| 3971 | CAGGAAGU G CUUCCACC | 467 | GGTGGAAG GGCTAGCTACAACGA ACTTCCTG | 7438 |
| 3977 | GUACUUCC G CCUCGGGC | 1792 | GCCCGAGG GGCTAGCTACAACGA GGAAGTAC | 7439 |
| 3984 | CACCUCGG G CACAUUUU | 2597 | AAAATGTG GGCTAGCTACAACGA CCGAGGTG | 7440 |
| 3986 | CCUCGGGC G CAUUUUGG | 1795 | CCAAAATG GGCTAGCTACAACGA GCCCGAGG | 7441 |
| 3988 | UCGGGCAC G UUUUGGGA | 1796 | TCCCAAAA GGCTAGCTACAACGA GTGCCCGA | 7442 |
| 3998 | UUUGGGAA G UEUCAUUC | 2598 | GAATGCAA GGCTAGCTACAACGA TTCCCAAA | 7443 |
| 4001 | GGGAAGUU G CAUUCCUU | 2599 | AAGGAATG GGCTAGCTACAACGA AACTTCCC | 7444 |
| 4003 | GAAGUUGC G UUCCUUUG | 1797 | CAAAGGAA GGCTAGCTACAACGA GCAACTTC | 7445 |
| 4011 | AUUCCUUU G UCUUCAAA | 2600 | TTTGAAGA GGCTAGCTACAACGA AAAGGAAT | 7446 |
| 4019 | GUCUUCAA G CUGUGAAG | 2981 | CTTCACAG GGCTAGCTACAACGA TTGAAGAC | 7447 |
| 4022 | UUCAAACU G UGAAGCAU | 2601 | ATGCTTCA GGCTAGCTACAACGA AGTTTGAA | 7448 |
| 4027 | ACUGUGAA G CAUUUACA | 2602 | TGTAAATG GGCTAGCTACAACGA TTCACAGT | 7449 |
| 4029 | UGUGAAGC G UUUACAGA | 1803 | TCTGTAAA GGCTAGCTACAACGA GCTTCACA | 7450 |
| 4033 | AAGCAUUU G CAGAAACG | 484 | CGTTTCTG GGCTAGCTACAACGA AAATGCTT | 7451 |
| 4039 | UUACAGAA G CGCAUCCA | 2982 | TGGATGCG GGCTAGCTACAACGA TTCTGTAA | 7452 |
| 4041 | ACAGAAAC G CAUCCAGC | 2603 | GCTGGATG GGCTAGCTACAACGA GTTTCTGT | 7453 |
| 4043 | AGAAACGC G UCCAGCAA | 1805 | TTGCTGGA GGCTAGCTACAACGA GCGTTTCT | 7454 |
| 4048 | CGCAUCCA G CAAGAAUA | 2604 | TATTCTTG GGCTAGCTACAACGA TGGATGCG | 7455 |
| 4054 | CAGCAAGA G UAUUGUCC | 2983 | GGACAATA GGCTAGCTACAACGA TCTTGCTG | 7456 |
| 4056 | GCAAGAAU G UUGUCCCU | 486 | AGGGACAA GGCTAGCTACAACGA ATTCTTGC | 7457 |
| 4059 | AGAAUAUU G UCCCUUUG | 2605 | CAAAGGGA GGCTAGCTACAACGA AATATTCT | 7458 |
| 4069 | CCCUUUGA G CAGAAAUU | 2606 | AATTTCTG GGCTAGCTACAACGA TCAAAGGG | 7459 |
| 4075 | GAGCAGAA G UUUAUCUU | 2984 | AAGATAAA GGCTAGCTACAACGA TTCTGCTC | 7460 |
| 4079 | AGAAAUUU G UCUUUCAA | 493 | TTGAAAGA GGCTAGCTACAACGA AAATTTCT | 7461 |
| 4092 | UCAAAGAG G UAUAUUUG | 2607 | CAAATATA GGCTAGCTACAACGA CTCTTTGA | 7462 |
| 4094 | AAAGAGGU G UAUUUGAA | 498 | TTCAAATA GGCTAGCTACAACGA ACCTCTTT | 7463 |
| 4096 | AGAGGUAU G UUUGAAAA | 499 | TTTTCAAA GGCTAGCTACAACGA ATACCTCT | 7464 |
| 4116 | AAAAAAAA G UAUAUGUG | 2608 | CACATATA GGCTAGCTACAACGA TTTTTTTT | 7465 |
| 4118 | AAAAAAGU G UAUGUGAG | 502 | CTCACATA GGCTAGCTACAACGA ACTTTTTT | 7466 |
| 4120 | AAAAGUAU G UGUGAGGA | 503 | TCCTCACA GGCTAGCTACAACGA ATACTTTT | 7467 |
| 4122 | AAGUAUAU G UGAGGAUU | 2609 | AATCCTCA GGCTAGCTACAACGA ATATACTT | 7468 |
| 4128 | AUGUGAGG G UUUUUAUU | 2985 | AATAAAAA GGCTAGCTACAACGA CCTCACAT | 7469 |
| 4134 | GGAUUUUU G UUGAUUGG | 508 | CCAATCAA GGCTAGCTACAACGA AAAAATCC | 7470 |
| 4138 | UUUUAUUG G UUGGGGAU | 2986 | ATCCCCAA GGCTAGCTACAACGA CAATAAAA | 7471 |
| 4145 | GAUUGGGG G UCUUGGAG | 2987 | CTCCAAGA GGCTAGCTACAACGA CCCCAATC | 7472 |
| 4153 | AUCUUGGA G UUUUUCAU | 2610 | ATGAAAAA GGCTAGCTACAACGA TCCAAGAT | 7473 |
| 4160 | AGUUUUUC G UUGUCGCU | 1816 | AGCGACAA GGCTAGCTACAACGA GAAAAACT | 7474 |
| 4163 | UUUUCUUU G UCGCUAUU | 2611 | AATAGCGA GGCTAGCTACAACGA AATGAAAA | 7475 |
| 4166 | UCAUUGUC G CUAUUGAU | 2612 | ATCAATAG GGCTAGCTACAACGA GACAATGA | 7476 |
| 4169 | UUGUCGCU G UUGAUUUU | 520 | AAAATCAA GGCTAGCTACAACGA AGCGACAA | 7477 |
| 4173 | CGCUAUUG G UUUUUACU | 2988 | AGTAAAAA GGCTAGCTACAACGA CAATAGCG | 7478 |
| 4179 | UGAUUUUU G CUUCAAUG | 526 | CATTGAAG GGCTAGCTACAACGA AAAAATCA | 7479 |
| 4185 | UUACUUCA G UGGGCUCU | 2989 | AGAGCCCA GGCTAGCTACAACGA TGAAGTAA | 7480 |
| 4189 | UUCAAUGG G CUCUUCCA | 2613 | TGGAAGAG GGCTAGCTACAACGA CCATTGAA | 7481 |
| 4198 | CUCUUCCA G CAAGGAAG | 2990 | CTTCCTTG GGCTAGCTACAACGA TGGAAGAG | 7482 |
| 4209 | AGGAAGAA G CUUGCUGG | 2614 | CCAGCAAG GGCTAGCTACAACGA TTCTTCCT | 7483 |
| 4213 | AGAAGCUU G CUGGUAGC | 2615 | GCTACCAG GGCTAGCTACAACGA AAGCTTCT | 7484 |
| 4217 | GCUUGCUG G UAGCACUU | 2616 | AAGTGCTA GGCTAGCTACAACGA CAGCAAGC | 7485 |
| 4220 | UGCUGGUA G CACUUGCU | 2617 | AGCAAGTG GGCTAGCTACAACGA TACCAGCA | 7486 |
| 4222 | CUGGUAGC G CUUGCUAC | 1827 | GTAGCAAG GGCTAGCTACAACGA GCTACCAG | 7487 |
| 4226 | UAGCACUU G CUACCCUG | 2618 | CAGGGTAG GGCTAGCTACAACGA AAGTGCTA | 7488 |
| 4229 | CACUUGCU G CCCUGAGU | 535 | ACTCAGGG GGCTAGCTACAACGA AGCAAGTG | 7489 |
| 4236 | UACCCUGA G UUCAUCCA | 2619 | TGGATGAA GGCTAGCTACAACGA TCAGGGTA | 7490 |
| 4240 | CUGAGUUC G UCCAGGCC | 1833 | GGCCTGGA GGCTAGCTACAACGA GAACTCAG | 7491 |
| 4246 | UCAUCCAG G CCCAACUG | 2620 | CAGTTGGG GGCTAGCTACAACGA CTGGATGA | 7492 |
| 4251 | CAGGCCCA G CUGUGAGC | 2991 | GCTCACAG GGCTAGCTACAACGA TGGGCCTG | 7493 |
| 4254 | GCCCAACU G UGAGCAAG | 2621 | CTTGCTCA GGCTAGCTACAACGA AGTTGGGC | 7494 |
| 4258 | AACUGUGA G CAAGGAGC | 2622 | GCTCCTTG GGCTAGCTACAACGA TCACAGTT | 7495 |
| 4265 | AGCAAGGA G CACAAGCC | 2623 | GGCTTGTG GGCTAGCTACAACGA TCCTTGCT | 7496 |
| 4267 | CAAGGAGC G CAAGCCAC | 1841 | GTGGCTTG GGCTAGCTACAACGA GCTCCTTG | 7497 |
| 4271 | GAGCACAA G CCACAAGU | 2624 | ACTTGTGG GGCTAGCTACAACGA TTGTGCTC | 7498 |
| 4274 | CACAAGCC G CAAGUCUU | 1844 | AAGACTTG GGCTAGCTACAACGA GGCTTGTG | 7499 |
| 4278 | AGCCACAA G UCUUCCAG | 2625 | CTGGAAGA GGCTAGCTACAACGA TTGTGGCT | 7500 |
| 4290 | UCCAGAGG G UGCUUGAU | 2992 | ATCAAGCA GGCTAGCTACAACGA CCTCTGGA | 7501 |
| 4292 | CAGAGGAU G CUUGAUUC | 2626 | GAATCAAG GGCTAGCTACAACGA ATCCTCTG | 7502 |
| 4297 | GAUGCUUG G UUCCAGUG | 2993 | CACTGGAA GGCTAGCTACAACGA CAAGCATC | 7503 |
| 4303 | UGAUUCCA G UGGUUCUG | 2627 | CAGAACCA GGCTAGCTACAACGA TGGAATCA | 7504 |
| 4306 | UUCCAGUG G UUCUGCUU | 2628 | AAGCAGAA GGCTAGCTACAACGA CACTGGAA | 7505 |
| 4311 | GUGGUUCU G CUUCAAGG | 2629 | CCTTGAAG GGCTAGCTACAACGA AGAACCAC | 7506 |
| 4319 | GCUUCAAG G CUUCCACU | 2630 | AGTGGAAG GGCTAGCTACAACGA CTTGAAGC | 7507 |
| 4325 | AGGCUUCC G CUGCAAAA | 1857 | TTTTGCAG GGCTAGCTACAACGA GGAAGCCT | 7508 |
| 4328 | CUUCCACU G CAAAACAC | 2631 | GTGTTTTG GGCTAGCTACAACGA AGTGGAAG | 7509 |
| 4333 | ACUGCAAA G CACUAAAG | 2994 | CTTTAGTG GGCTAGCTACAACGA TTTGCAGT | 7510 |
| 4335 | UGCAAAAC G CUAAAGAU | 1860 | ATCTTTAG GGCTAGCTACAACGA GTTTTGCA | 7511 |
| 4342 | CACUAAAG G UCCAAGAA | 2995 | TTCTTGGA GGCTAGCTACAACGA CTTTAGTG | 7512 |
| 4352 | CCAAGAAG G CCUUCAUG | 2632 | CATGAAGG GGCTAGCTACAACGA CTTCTTGG | 7513 |
| 4358 | AGGCCUUC G UGGCCCCA | 1866 | TGGGGCCA GGCTAGCTACAACGA GAAGGCCT | 7514 |
| 4361 | CCUUCAUG G CCCCAGCA | 2633 | TGCTGGGG GGCTAGCTACAACGA CATGAAGG | 7515 |
| 4367 | UGGCCCCA G CAGGCCGG | 2634 | CCGGCCTG GGCTAGCTACAACGA TGGGGCCA | 7516 |
| 4371 | CCCAGCAG G CCGGAUCG | 2635 | CGATCCGG GGCTAGCTACAACGA CTGCTGGG | 7517 |
| 4376 | CAGGCCGG G UCGGUACU | 2996 | AGTACCGA GGCTAGCTACAACGA CCGGCCTG | 7518 |
| 4380 | CCGGAUCG G UACUGUAU | 2636 | ATACAGTA GGCTAGCTACAACGA CGATCCGG | 7519 |
| 4382 | GGAUCGGU G CUGUAUCA | 556 | TGATACAG GGCTAGCTACAACGA ACCGATCC | 7520 |
| 4385 | UCGGUACU G UAUCAAGU | 2637 | ACTTGATA GGCTAGCTACAACGA AGTACCGA | 7521 |
| 4387 | GGUACUGU G UCAAGUCA | 557 | TGACTTGA GGCTAGCTACAACGA ACAGTACC | 7522 |
| 4392 | UGUAUCAA G UCAUGGCA | 2638 | TGCCATGA GGCTAGCTACAACGA TTGATACA | 7523 |
| 4395 | AUCAAGUC G UGGCAGGU | 1875 | ACCTGCCA GGCTAGCTACAACGA GACTTGAT | 7524 |
| 4398 | AAGUCAUG G CAGGUACA | 2639 | TGTACCTG GGCTAGCTACAACGA CATGACTT | 7525 |
| 4402 | CAUGGCAG G UACAGUAG | 2640 | CTACTGTA GGCTAGCTACAACGA CTGCCATG | 7526 |
| 4404 | UGGCAGGU G CAGUAGGA | 560 | TCCTACTG GGCTAGCTACAACGA ACCTGCCA | 7527 |
| 4407 | CAGGUACA G UAGGAUAA | 2641 | TTATCCTA GGCTAGCTACAACGA TGTACCTG | 7528 |
| 4412 | ACAGUAGG G UAAGCCAC | 2997 | GTGGCTTA GGCTAGCTACAACGA CCTACTGT | 7529 |
| 4416 | UAGGAUAA G CCACUCUG | 2642 | CAGAGTGG GGCTAGCTACAACGA TTATCCTA | 7530 |
| 4419 | GAUAAGCC G CUCUGUCC | 1879 | GGACAGAG GGCTAGCTACAACGA GGCTTATC | 7531 |
| 4424 | GCCACUCU G UCCCUUCC | 2643 | GGAAGGGA GGCTAGCTACAACGA AGAGTGGC | 7532 |
| 4436 | CUUCCUGG G CAAAGAAG | 2644 | CTTCTTTG GGCTAGCTACAACGA CCAGGAAG | 7533 |
| 4447 | AAGAAGAA G CGGAGGGG | 2998 | CCCCTCCG GGCTAGCTACAACGA TTCTTCTT | 7534 |
| 4456 | CGGAGGGG G UGAAUUCU | 2999 | AGAATTCA GGCTAGCTACAACGA CCCCTCCG | 7535 |
| 4460 | GGGGAUGA G UUCUUCCU | 3000 | AGGAAGAA GGCTAGCTACAACGA TCATCCCC | 7536 |
| 4472 | UUCCUUAG G CUUACUUU | 3001 | AAAGTAAG GGCTAGCTACAACGA CTAAGGAA | 7537 |
| 4476 | UUAGACUU G CUUUUGUA | 574 | TACAAAAG GGCTAGCTACAACGA AAGTCTAA | 7538 |
| 4482 | UUACUUUU G UAAAAAUG | 2645 | CATTTTTA GGCTAGCTACAACGA AAAAGTAA | 7539 |
| 4488 | UUGUAAAA G UGUCCCCA | 3002 | TGGGGACA GGCTAGCTACAACGA TTTTACAA | 7540 |
| 4490 | GUAAAAAU G UCCCCACG | 2646 | CGTGGGGA GGCTAGCTACAACGA ATTTTTAC | 7541 |
| 4496 | AUGUCCCC G CGGUACUU | 1896 | AAGTACCG GGCTAGCTACAACGA GGGGACAT | 7542 |
| 4499 | UCCCCACG G UACUUACU | 2647 | AGTAAGTA GGCTAGCTACAACGA CGTGGGGA | 7543 |
| 4501 | CCCACGGU G CUUACUCC | 580 | GGAGTAAG GGCTAGCTACAACGA ACCGTGGG | 7544 |
| 4505 | CGGUACUU G CUCCCCAC | 582 | GTGGGGAG GGCTAGCTACAACGA AAGTACCG | 7545 |
| 4512 | UACUCCCC G CUGAUGGA | 1902 | TCCATCAG GGCTAGCTACAACGA GGGGAGTA | 7546 |
| 4516 | CCCCACUG G UGGACCAG | 3003 | CTGGTCCA GGCTAGCTACAACGA CAGTGGGG | 7547 |
| 4520 | ACUGAUGG G CCAGUGGU | 3004 | ACCACTGG GGCTAGCTACAACGA CCATCAGT | 7548 |
| 4524 | AUGGACCA G UGGUUUCC | 2648 | GGAAACCA GGCTAGCTACAACGA TGGTCCAT | 7549 |
| 4527 | GACCAGUG G UUUCCAGU | 2649 | ACTGGAAA GGCTAGCTACAACGA CACTGGTC | 7550 |
| 4534 | GGUUUCCA G UCAUGAGC | 2650 | GCTCATGA GGCTAGCTACAACGA TGGAAACC | 7551 |
| 4537 | UUCCAGUC G UGAGCGUU | 1908 | AACGCTCA GGCTAGCTACAACGA GACTGGAA | 7552 |
| 4541 | AGUCAUGA G CGUUAGAC | 2651 | GTCTAACG GGCTAGCTACAACGA TCATGACT | 7553 |
| 4543 | UCAUGAGC G UUAGACUG | 2652 | CAGTCTAA GGCTAGCTACAACGA GCTCATGA | 7554 |
| 4548 | AGCGUUAG G CUGACUUU | 3005 | CAAGTCAG GGCTAGCTACAACGA CTAACGCT | 7555 |
| 4552 | UUAGACUG G CUUGUUUG | 3006 | CAAACAAG GGCTAGCTACAACGA CAGTCTAA | 7556 |
| 4556 | ACUGACUU G UUUGUCUU | 2653 | AAGACAAA GGCTAGCTACAACGA AAGTCAGT | 7557 |
| 4560 | ACUUGUUU G UCUUCCAU | 2654 | ATGGAAGA GGCTAGCTACAACGA AAACAAGT | 7558 |
| 4567 | UGUCUUCC G UUCCAUUG | 1913 | CAATGGAA GGCTAGCTACAACGA GGAAGACA | 7559 |
| 4572 | UCCAUUCC G UUGUUUUG | 1915 | CAAAACAA GGCTAGCTACAACGA GGAATGGA | 7560 |
| 4575 | AUUCCAUU G UUUUGAAA | 2655 | TTTCAAAA GGCTAGCTACAACGA AATGGAAT | 7561 |
| 4583 | UTUUUGAA G CUCAGUAU | 3007 | ATACTGAG GGCTAGCTACAACGA TTCAAAAC | 7562 |
| 4588 | GAAACUCA G UAUGCCGC | 2656 | GCGGCATA GGCTAGCTACAACGA TGAGTTTC | 7563 |
| 4590 | AACUCAGU G UGCCGCCC | 603 | GGGCGGCA GGCTAGCTACAACGA ACTGAGTT | 7564 |
| 4592 | CUCAGUAU G CCGCCCCU | 2657 | AGGGGCGG GGCTAGCTACAACGA ATACTGAG | 7565 |
| 4595 | AGUAUGCC G CCCCUGUC | 2658 | GACAGGGG GGCTAGCTACAACGA GGCATACT | 7566 |
| 4601 | CCGCCCCU G UCUUGCUG | 2659 | CAGCAAGA GGCTAGCTACAACGA AGGGGCGG | 7567 |
| 4606 | CCUGUCUU G CUGUCAUG | 2660 | CATGACAG GGCTAGCTACAACGA AAGACAGG | 7568 |
| 4609 | GUCUUGCU G UCAUGAAA | 2661 | TTTCATGA GGCTAGCTACAACGA AGCAAGAC | 7569 |
| 4612 | UUGCUGUC G UGAAAUCA | 1925 | TGATTTCA GGCTAGCTACAACGA GACAGCAA | 7570 |
| 4617 | GUCAUGAA G UCAGCAAG | 3008 | CTTGCTGA GGCTAGCTACAACGA TTCATGAC | 7571 |
| 4621 | UGAAAUCA G CAAGAGAG | 2662 | CTCTCTTG GGCTAGCTACAACGA TGATTTCA | 7572 |
| 4631 | AAGAGAGG G UGACACAU | 3009 | ATGTGTCA GGCTAGCTACAACGA CCTCTCTT | 7573 |
| 4634 | AGAGGAUG G CACAUCAA | 3010 | TTGATGTG GGCTAGCTACAACGA CATCCTCT | 7574 |
| 4636 | AGGAUGAC G CAUCAAAU | 1928 | ATTTGATG GGCTAGCTACAACGA GTCATCCT | 7575 |
| 4638 | GAUGACAC G UCAAAUAA | 1929 | TTATTTGA GGCTAGCTACAACGA GTGTCATC | 7576 |
| 4643 | CACAUCAA G UAAUAACU | 3011 | AGTTATTA GGCTAGCTACAACGA TTGATGTG | 7577 |
| 4646 | AUCAAAUA G UAACUCGG | 3012 | CCGAGTTA GGCTAGCTACAACGA TATTTGAT | 7578 |
| 4649 | AAAUAAUA G CUCGGAUU | 3013 | AATCCGAG GGCTAGCTACAACGA TATTATTT | 7579 |
| 4655 | UAACUCGG G UUCCAGCC | 3014 | GGCTGGAA GGCTAGCTACAACGA CCGAGTTA | 7580 |
| 4661 | GGAUUCCA G CCCACAUU | 2663 | AATGTGGG GGCTAGCTACAACGA TGGAATCC | 7581 |
| 4665 | UCCAGCCC G CAUUGGAU | 1936 | ATCCAATG GGCTAGCTACAACGA GGGCTGGA | 7582 |
| 4667 | CAGCCCAC G UUGGAUUC | 1937 | GAATCCAA GGCTAGCTACAACGA GTGGGCTG | 7583 |
| 4672 | CACAUUGG G UUCAUCAG | 3015 | CTGATGAA GGCTAGCTACAACGA CCAATGTG | 7584 |
| 4676 | UUGGAUUC G UCAGCAUU | 1938 | AATGCTGA GGCTAGCTACAACGA GAATCCAA | 7585 |
| 4680 | AUUCAUCA G CAUUUGGA | 2664 | TCCAAATG GGCTAGCTACAACGA TGATGAAT | 7586 |
| 4682 | UCAUCAGC G UUUGGACC | 1940 | GGTCCAAA GGCTAGCTACAACGA GCTGATGA | 7587 |
| 4688 | GCAUUUGG G CCAAUAGC | 3016 | GCTATTGG GGCTAGCTACAACGA CCAAATGC | 7588 |
| 4692 | UUGGACCA G UAGCCCAC | 3017 | GTGGGCTA GGCTAGCTACAACGA TGGTCCAA | 7589 |
| 4695 | GACCAAUA G CCCACAGC | 2665 | GCTGTGGG GGCTAGCTACAACGA TATTGGTC | 7590 |
| 4699 | AAUAGCCC G CAGCUGAG | 1945 | CTCAGCTG GGCTAGCTACAACGA GGGCTATT | 7591 |
| 4702 | AGCCCACA G CUGAGAAU | 2666 | ATTCTCAG GGCTAGCTACAACGA TGTGGGCT | 7592 |
| 4709 | AGCUGAGA G UGUGGAAU | 3018 | ATTCCACA GGCTAGCTACAACGA TCTCAGCT | 7593 |
| 4711 | CUGAGAAU G UGGAAUAC | 2667 | GTATTCCA GGCTAGCTACAACGA ATTCTCAG | 7594 |
| 4716 | AAUGUGGA G UACCUAAG | 3019 | CTTAGGTA GGCTAGCTACAACGA TCCACATT | 7595 |
| 4718 | UGUGGAAU G CCUAAGGA | 621 | TCCTTAGG GGCTAGCTACAACGA ATTCCACA | 7596 |
| 4726 | ACCUAAGG G UAACACCG | 3020 | CGGTGTTA GGCTAGCTACAACGA CCTTAGGT | 7597 |
| 4729 | UAAGGAUA G CACCGCUU | 3021 | AAGCGGTG GGCTAGCTACAACGA TATCCTTA | 7598 |
| 4731 | AGGAUAAC G CCGCUUUU | 1950 | AAAAGCGG GGCTAGCTACAACGA GTTATCCT | 7599 |
| 4734 | AUAACACC G CUUUUGUU | 2668 | AACAAAAG GGCTAGCTACAACGA GGTGTTAT | 7600 |
| 4740 | CCGCUUUU G UUCUCGCA | 2669 | TGCGAGAA GGCTAGCTACAACGA AAAAGCGG | 7601 |
| 4746 | UUGUUCUC G CAAAAACG | 2670 | CGTTTTTG GGCTAGCTACAACGA GAGAACAA | 7602 |
| 4752 | UCGCAAAA G CGUAUCUC | 3022 | GAGATACG GGCTAGCTACAACGA TTTTGCGA | 7603 |
| 4754 | GCAAAAAC G UAUCUCCU | 2671 | AGGAGATA GGCTAGCTACAACGA GTTTTTGC | 7604 |
| 4756 | AAAAACGU G UCUCCUAA | 630 | TTAGGAGA GGCTAGCTACAACGA ACGTTTTT | 7605 |
| 4764 | AUCUCCUA G UUUGAGGC | 3023 | GCCTCAAA GGCTAGCTACAACGA TAGGAGAT | 7606 |
| 4771 | AAUUUGAG G CUCAGAUG | 2672 | CATCTGAG GGCTAGCTACAACGA CTCAAATT | 7607 |
| 4777 | AGGCUCAG G UGAAAUGC | 3024 | GCATTTCA GGCTAGCTACAACGA CTGAGCCT | 7608 |
| 4782 | CAGAUGAA G UGCAUCAG | 3025 | CTGATGCA GGCTAGCTACAACGA TTCATCTG | 7609 |
| 4784 | GAUGAAAU G CAUCAGGU | 2673 | ACCTGATG GGCTAGCTACAACGA ATTTCATC | 7610 |
| 4786 | UGAAAUGC G UCAGGUCC | 1960 | GGACCTGA GGCTAGCTACAACGA GCATTTCA | 7611 |
| 4791 | UGCAUCAG G UCCUUUGG | 2674 | CCAAAGGA GGCTAGCTACAACGA CTGATGCA | 7612 |
| 4801 | CCUUUGGG G CAUAGAUC | 2675 | GATCTATG GGCTAGCTACAACGA CCCAAAGG | 7613 |
| 4803 | UUUGGGGC G UAGAUCAG | 1964 | CTGATCTA GGCTAGCTACAACGA GCCCCAAA | 7614 |
| 4807 | GGGCAUAG G UCAGAAGA | 3026 | TCTTCTGA GGCTAGCTACAACGA CTATGCCC | 7615 |
| 4815 | AUCAGAAG G CUACAAAA | 3027 | TTTTGTAG GGCTAGCTACAACGA CTTCTGAT | 7616 |
| 4818 | AGAAGACU G CAAAAAUG | 643 | CATTTTTG GGCTAGCTACAACGA AGTCTTCT | 7617 |
| 4824 | CUACAAAA G UGAAGCUG | 3028 | CAGCTTCA GGCTAGCTACAACGA TTTTGTAG | 7618 |
| 4829 | AAAAUGAA G CUGCUCUG | 2676 | CAGACCAG GGCTAGCTACAACGA TTCATTTT | 7619 |
| 4832 | AUGAAGCU G CUCUGAAA | 2677 | TTTCAGAG GGCTAGCTACAACGA AGCTTCAT | 7620 |
| 4840 | GCUCUGAA G UCUCCUUU | 3029 | AAAGGAGA GGCTAGCTACAACGA TTCAGAGC | 7621 |
| 4850 | CUCCUUUA G CCAUCACC | 2678 | GGTGATGG GGCTAGCTACAACGA TAAAGGAG | 7622 |
| 4853 | CUUUAGCC G UCACCCCA | 1975 | TGGGGTGA GGCTAGCTACAACGA GGCTAAAG | 7623 |
| 4856 | UAGCCAUC G CCCCAACC | 1976 | GGTTGGGG GGCTAGCTACAACGA GATGGCTA | 7624 |
| 4862 | UCACCCCA G CCCCCCAA | 3030 | TTGGGGGG GGCTAGCTACAACGA TGGGGTGA | 7625 |
| 4872 | CCCCCAAA G UUAGUUUG | 3031 | CAAACTAA GGCTAGCTACAACGA TTTGGGGG | 7626 |
| 4876 | CAAAAUUA G UUUGUGUU | 2679 | AACACAAA GGCTAGCTACAACGA TAATTTTG | 7627 |
| 4880 | AUUAGUUU G UGUUACUU | 2680 | AAGTAACA GGCTAGCTACAACGA AAACTAAT | 7628 |
| 4882 | UAGUUUGU G UUACUUAU | 2681 | ATAAGTAA GGCTAGCTACAACGA ACAAACTA | 7629 |
| 4885 | UUUGUGUU G CUUAUGGA | 656 | TCCATAAG GGCTAGCTACAACGA AACACAAA | 7630 |
| 4889 | UGUUACUU G UGGAAGAU | 658 | ATCTTCCA GGCTAGCTACAACGA AAGTAACA | 7631 |
| 4896 | UAUGGAAG G UAGUUUUC | 3032 | GAAAACTA GGCTAGCTACAACGA CTTCCATA | 7632 |
| 4899 | GGAAGAUA G UUUUCUCC | 2682 | GGAGAAAA GGCTAGCTACAACGA TATCTTCC | 7633 |
| 4912 | CUCCUUUU G CUUCACUU | 668 | AAGTGAAG GGCTAGCTACAACGA AAAAGGAG | 7634 |
| 4917 | UUUACUUC G CUUCAAAA | 1992 | TTTTGAAG GGCTAGCTACAACGA GAAGTAAA | 7635 |
| 4926 | CUUCAAAA G CUUUUUAC | 2683 | GTAAAAAG GGCTAGCTACAACGA TTTTGAAG | 7636 |
| 4933 | AGCUUUUU G CUCAAAGA | 677 | TCTTTGAG GGCTAGCTACAACGA AAAAAGCT | 7637 |
| 4942 | CUCAAAGA G UAUAUGUU | 2684 | AACATATA GGCTAGCTACAACGA TCTTTGAG | 7638 |
| 4944 | CAAAGAGU G UAUGUUCC | 679 | GGAACATA GGCTAGCTACAACGA ACTCTTTG | 7639 |
| 4946 | AAGAGUAU G UGUUCCCU | 680 | AGGGAACA GGCTAGCTACAACGA ATACTCTT | 7640 |
| 4948 | GAGUAUAU G UUCCCUCC | 2685 | GGAGGGAA GGCTAGCTACAACGA ATATACTC | 7641 |
| 4959 | CCCUCCAG G UCAGCUGC | 2686 | GCAGCTGA GGCTAGCTACAACGA CTGGAGGG | 7642 |
| 4963 | CCAGGUCA G CUGCCCCC | 2687 | GGGGGCAG GGCTAGCTACAACGA TGACCTGG | 7643 |
| 4966 | GGUCAGCU G CCCCCAAA | 2688 | TTTGGGGG GGCTAGCTACAACGA AGCTGACC | 7644 |
| 4974 | GCCCCCAA G CCCCCUCC | 3033 | GGAGGGGG GGCTAGCTACAACGA TTGGGGGC | 7645 |
| 4985 | CCCUCCUU G CGCUUUGU | 687 | ACAAAGCG GGCTAGCTACAACGA AAGGAGGG | 7646 |
| 4987 | CUCCUUAC G CUTUGUCA | 2689 | TGACAAAG GGCTAGCTACAACGA GTAAGGAG | 7647 |
| 4992 | UACGCUUU G UCACACAA | 2690 | TTGTGTGA GGCTAGCTACAACGA AAAGCGTA | 7648 |
| 4995 | GCUUUGUC G CACAAAAA | 2018 | TTTTTGTG GGCTAGCTACAACGA GACAAAGC | 7649 |
| 4997 | UUUGUCAC G CAAAAAGU | 2019 | ACTTTTTG GGCTAGCTACAACGA GTGACAAA | 7650 |
| 5004 | CACAAAAA G UGUCUCUG | 2691 | CAGAGACA GGCTAGCTACAACGA TTTTTGTG | 7651 |
| 5006 | CAAAAAGU G UCUCUGCC | 2692 | GGCAGAGA GGCTAGCTACAACGA ACTTTTTG | 7652 |
| 5012 | GUGUCUCU G CCUUGAGU | 2693 | ACTCAAGG GGCTAGCTACAACGA AGAGACAC | 7653 |
| 5019 | UGCCUUGA G UCAUCUAU | 2694 | ATAGATGA GGCTAGCTACAACGA TCAAGGCA | 7654 |
| 5022 | CUUGAGUC G UCUAUUCA | 2025 | TGAATAGA GGCTAGCTACAACGA GACTCAAG | 7655 |
| 5026 | AGUCAUCU G UUCAAGCA | 696 | TGCTTGAA GGCTAGCTACAACGA AGATGACT | 7656 |
| 5032 | CUAUUCAA G CACUUACA | 2695 | TGTAAGTG GGCTAGCTACAACGA TTGAATAG | 7657 |
| 5034 | AUUCAAGC G CUUACAGC | 2028 | GCTGTAAG GGCTAGCTACAACGA GCTTGAAT | 7658 |
| 5038 | AAGCACUU G CAGCUCUG | 700 | CAGAGCTG GGCTAGCTACAACGA AAGTGCTT | 7659 |
| 5041 | CACUUACA G CUCUGGCC | 2696 | GGCCAGAG GGCTAGCTACAACGA TGTAAGTG | 7660 |
| 5047 | CAGCUCUG G CCACAACA | 2697 | TGTTGTGG GGCTAGCTACAACGA CAGAGCTG | 7661 |
| 5050 | CUCUGGCC G CAACAGGG | 2034 | CCCTGTTG GGCTAGCTACAACGA GGCCAGAG | 7662 |
| 5053 | UGGCCACA G CAGGGCAU | 3034 | ATGCCCTG GGCTAGCTACAACGA TGTGGCCA | 7663 |
| 5058 | ACAACAGG G CAUUUUAC | 2698 | GTAAAATG GGCTAGCTACAACGA CCTGTTGT | 7664 |
| 5060 | AACAGGGC G UUUUACAG | 2037 | CTGTAAAA GGCTAGCTACAACGA GCCCTGTT | 7665 |
| 5065 | GGCAUUUU G CAGGUGCG | 705 | CGCACCTG GGCTAGCTACAACGA AAAATGCC | 7666 |
| 5069 | UTUUACAG G UGCGAAUG | 2699 | CATTCGCA GGCTAGCTACAACGA CTGTAAAA | 7667 |
| 5071 | UUACAGGU G CGAAUGAC | 2700 | GTCATTCG GGCTAGCTACAACGA ACCTGTAA | 7668 |
| 5075 | AGGUGCGA G UGACAGUA | 3035 | TACTGTCA GGCTAGCTACAACGA TCGCACCT | 7669 |
| 5078 | UGCGAAUG G CAGUAGCA | 3036 | TGCTACTG GGCTAGCTACAACGA CATTCGCA | 7670 |
| 5081 | GAAUGACA G UAGCAUUA | 2701 | TAATGCTA GGCTAGCTACAACGA TGTCATTC | 7671 |
| 5084 | UGACAGUA G CAUUAUGA | 2702 | TCATAATG GGCTAGCTACAACGA TACTGTCA | 7672 |
| 5086 | ACAGUAGC G UUAUGAGU | 2040 | ACTCATAA GGCTAGCTACAACGA GCTACTGT | 7673 |
| 5089 | GUAGCAUU G UGAGUAGU | 708 | ACTACTCA GGCTAGCTACAACGA AATGCTAC | 7674 |
| 5093 | CAUUAUGA G UAGUGUGA | 2703 | TCACACTA GGCTAGCTACAACGA TCATAATG | 7675 |
| 5096 | UAUGAGUA G UGUGAAUU | 2704 | AATTCACA GGCTAGCTACAACGA TACTCATA | 7676 |
| 5098 | UGAGUAGU G UGAAUUCA | 2705 | TGAATTCA GGCTAGCTACAACGA ACTACTCA | 7677 |
| 5102 | UAGUGUGA G UUCAGGUA | 3037 | TACCTGAA GGCTAGCTACAACGA TCACACTA | 7678 |
| 5108 | GAAUUCAG G UAGUAAAU | 2706 | ATTTACTA GGCTAGCTACAACGA CTGAATTC | 7679 |
| 5111 | UUCAGGUA G UAAAUAUG | 2707 | CATATTTA GGCTAGCTACAACGA TACCTGAA | 7680 |
| 5115 | GGUAGUAA G UAUGAAAC | 3038 | GTTTCATA GGCTAGCTACAACGA TTACTACC | 7681 |
| 5117 | UAGUAAAU G UGAAACUA | 714 | TAGTTTCA GGCTAGCTACAACGA ATTTACTA | 7682 |
| 5122 | AAUAUGAA G CUAGGGUU | 3039 | AACCCTAG GGCTAGCTACAACGA TTCATATT | 7683 |
| 5128 | AAACUAGG G UUUGAAAU | 2708 | ATTTCAAA GGCTAGCTACAACGA CCTAGTTT | 7684 |
| 5135 | GGUUUGAA G UUGAUAAU | 3040 | ATTATCAA GGCTAGCTACAACGA TTCAAACC | 7685 |
| 5139 | UGAAAUUG G UAAUGCUU | 3041 | AAGCATTA GGCTAGCTACAACGA CAATTTCA | 7686 |
| 5142 | AAUUGAUA G UGCUUUCA | 3042 | TGAAAGCA GGCTAGCTACAACGA TATCAATT | 7687 |
| 5144 | UUGAUAAU G CUUUCACA | 2709 | TGTGAAAG GGCTAGCTACAACGA ATTATCAA | 7688 |
| 5150 | AUGCUUUC G CAACAUUU | 2044 | AAATGTTG GGCTAGCTACAACGA GAAAGCAT | 7689 |
| 5153 | CUUUCACA G CAUUUGCA | 3043 | TGCAAATG GGCTAGCTACAACGA TGTGAAAG | 7690 |
| 5155 | UUCACAAC G UUUGCAGA | 2046 | TCTGCAAA GGCTAGCTACAACGA GTTGTGAA | 7691 |
| 5159 | CAACAUUU G CAGAUGUU | 2710 | AACATCTG GGCTAGCTACAACGA AAATGTTG | 7692 |
| 5163 | AUUUGCAG G UGUUUUAG | 3044 | CTAAAACA GGCTAGCTACAACGA CTGCAAAT | 7693 |
| 5165 | UUGCAGAU G UUUUAGAA | 2711 | TTCTAAAA GGCTAGCTACAACGA ATCTGCAA | 7694 |
| 5182 | GGAAAAAA G UUCCUUCC | 2712 | GGAAGGAA GGCTAGCTACAACGA TTTTTTCC | 7695 |
| 5195 | UUCCUAAA G UAAUUUCU | 3045 | AGAAATTA GGCTAGCTACAACGA TTTAGGAA | 7696 |
| 5198 | CUAAAAUA G UUUCUCUA | 3046 | TAGAGAAA GGCTAGCTACAACGA TATTTTAG | 7697 |
| 5206 | AUUUCUCU G CAAUUGGA | 739 | TCCAATTG GGCTAGCTACAACGA AGAGAAAT | 7698 |
| 5209 | UCUCUACA G UUGGAAGA | 3047 | TCTTCCAA GGCTAGCTACAACGA TGTAGAGA | 7699 |
| 5217 | AUUGGAAG G UUGGAAGA | 3048 | TCTTCCAA GGCTAGCTACAACGA CTTCCAAT | 7700 |
| 5225 | AUUGGAAG G UUCAGCUA | 3049 | TAGCTGAA GGCTAGCTACAACGA CTTCCAAT | 7701 |
| 5230 | AAGAUUCA G CUAGUUAG | 2713 | CTAACTAG GGCTAGCTACAACGA TGAATCTT | 7702 |
| 5234 | UUCAGCUA G UUAGGAGC | 2714 | GCTCCTAA GGCTAGCTACAACGA TAGCTGAA | 7703 |
| 5241 | AGUUAGGA G CCCAUUUU | 2715 | AAAATGGG GGCTAGCTACAACGA TCCTAACT | 7704 |
| 5245 | AGGAGCCC G UUUUUUCC | 2059 | GGAAAAAA GGCTAGCTACAACGA GGGCTCCT | 7705 |
| 5256 | UUUUCCUA G UCUCUGUG | 3050 | CACACAGA GGCTAGCTACAACGA TAGGAAAA | 7706 |
| 5260 | CCUAAUCU G UGUGUGCC | 2716 | GGCACACA GGCTAGCTACAACGA AGATTAGG | 7707 |
| 5262 | UAAUCUGU G UGUGCCCU | 2717 | AGGGCACA GGCTAGCTACAACGA ACAGATTA | 7708 |
| 5264 | AUCUGUGU G UGCCCUGU | 2718 | ACAGGGCA GGCTAGCTACAACGA ACACAGAT | 7709 |
| 5266 | CUGUGUGU G CCCUGUAA | 2719 | TTACAGGG GGCTAGCTACAACGA ACACACAG | 7710 |
| 5271 | UGUGCCCU G UAACCUGA | 2720 | TCAGGTTA GGCTAGCTACAACGA AGGGCACA | 7711 |
| 5274 | GCCCUGUA G CCUGACUG | 3051 | CAGTCAGG GGCTAGCTACAACGA TACAGGGC | 7712 |
| 5279 | GUAACCUG G CUGGUUAA | 3052 | TTAACCAG GGCTAGCTACAACGA CAGGTTAC | 7713 |
| 5283 | CCUGACUG G UUAACAGC | 2721 | GCTGTTAA GGCTAGCTACAACGA CAGTCAGG | 7714 |
| 5287 | ACUGGUUA G CAGCAGUC | 3053 | GACTGCTG GGCTAGCTACAACGA TAACCAGT | 7715 |
| 5290 | GGUUAACA G CAGUCCUU | 2722 | AAGGACTG GGCTAGCTACAACGA TGTTAACC | 7716 |
| 5293 | UAACAGCA G UCCUUUGU | 2723 | ACAAAGGA GGCTAGCTACAACGA TGCTGTTA | 7717 |
| 5300 | AGUCCUUU G UAAACAGU | 2724 | ACTGTTTA GGCTAGCTACAACGA AAAGGACT | 7718 |
| 5304 | CUUUGUAA G CAGUGUUU | 3054 | AAACACTG GGCTAGCTACAACGA TTACAAAG | 7719 |
| 5307 | UGUAAACA G UGUUUUAA | 2725 | TTAAAACA GGCTAGCTACAACGA TGTTTACA | 7720 |
| 5309 | UAAACAGU G UUUUAAAC | 2726 | GTTTAAAA GGCTAGCTACAACGA ACTGTTTA | 7721 |
| 5316 | UGUUUUAA G CUCUCCUA | 3055 | TAGGAGAG GGCTAGCTACAACGA TTAAAACA | 7722 |
| 5325 | CUCUCCUA G UCAAUAUC | 2727 | GATATTGA GGCTAGCTACAACGA TAGGAGAG | 7723 |
| 5329 | CCUAGUCA G UAUCCACC | 3056 | GGTGGATA GGCTAGCTACAACGA TGACTAGG | 7724 |
| 5331 | UAGUCAAU G UCCACCCC | 770 | GGGGTGGA GGCTAGCTACAACGA ATTGACTA | 7725 |
| 5335 | CAAUAUCC G CCCCAUCC | 2080 | GGATGGGG GGCTAGCTACAACGA GGATATTG | 7726 |
| 5340 | UCCACCCC G UCCAAUUU | 2084 | AAATTGGA GGCTAGCTACAACGA GGGGTGGA | 7727 |
| 5345 | CCCAUCCA G UUUAUCAA | 3057 | TTGATAAA GGCTAGCTACAACGA TGGATGGG | 7728 |
| 5349 | UCCAAUUU G UCAAGGAA | 775 | TTCCTTGA GGCTAGCTACAACGA AAATTGGA | 7729 |
| 5361 | AGGAAGAA G UGGUUCAG | 3058 | CTGAACCA GGCTAGCTACAACGA TTCTTCCT | 7730 |
| 5364 | AAGAAAUG G UUCAGAAA | 2728 | TTTCTGAA GGCTAGCTACAACGA CATTTCTT | 7731 |
| 5373 | UUCAGAAA G UAUUUUCA | 3059 | TGAAAATA GGCTAGCTACAACGA TTTCTGAA | 7732 |
| 5375 | CAGAAAAU G UUUUCAGC | 779 | GCTGAAAA GGCTAGCTACAACGA ATTTTCTG | 7733 |
| 5382 | UAUUUUCA G CCUACAGU | 2729 | ACTGTAGG GGCTAGCTACAACGA TGAAAATA | 7734 |
| 5386 | UUCAGCCU G CAGUUAUG | 784 | CATAACTG GGCTAGCTACAACGA AGGCTGAA | 7735 |
| 5389 | AGCCUACA G UUAUGUUC | 2730 | GAACATAA GGCTAGCTACAACGA TGTAGGCT | 7736 |
| 5392 | CUACAGUU G UGUUCAGU | 786 | ACTGAACA GGCTAGCTACAACGA AACTGTAG | 7737 |
| 5394 | ACAGUUAU G UUCAGUCA | 2731 | TGACTGAA GGCTAGCTACAACGA ATAACTGT | 7738 |
| 5399 | UAUGUUCA G UCACACAC | 2732 | GTGTGTGA GGCTAGCTACAACGA TGAACATA | 7739 |
| 5402 | GUUCAGUC G CACACACA | 2094 | TGTGTGTG GGCTAGCTACAACGA GACTGAAC | 7740 |
| 5404 | UCAGUCAC G CACACAUA | 2095 | TATGTGTG GGCTAGCTACAACGA GTGACTGA | 7741 |
| 5406 | AGUCACAC G CACAUACA | 2096 | TGTATGTG GGCTAGCTACAACGA GTGTGACT | 7742 |
| 5408 | UCACACAC G CAUACAAA | 2097 | TTTGTATG GGCTAGCTACAACGA GTGTGTGA | 7743 |
| 5410 | ACACACAC G UACAAAAU | 2098 | ATTTTGTA GGCTAGCTACAACGA GTGTGTGT | 7744 |
| 5412 | ACACACAU G CAAAAUGU | 790 | ACATTTTG GGCTAGCTACAACGA ATGTGTGT | 7745 |
| 5417 | CAUACAAA G UGUUCCUU | 3060 | AAGGAACA GGCTAGCTACAACGA TTTGTATG | 7746 |
| 5419 | UACAAAAU G UUCCUUUU | 2733 | AAAAGGAA GGCTAGCTACAACGA ATTTTGTA | 7747 |
| 5428 | UUCCUUUU G CUUUUAAA | 2734 | TTTAAAAG GGCTAGCTACAACGA AAAAGGAA | 7748 |
| 5437 | CUTUUAAA G UAAUUUUU | 2735 | AAAAATTA GGCTAGCTACAACGA TTTAAAAG | 7749 |
| 5440 | UUAAAGUA G UUUUUGAC | 3061 | GTCAAAAA GGCTAGCTACAACGA TACTTTAA | 7750 |
| 5447 | AAUUUUUG G CUCCCAGA | 3062 | TCTGGGAG GGCTAGCTACAACGA CAAAAATT | 7751 |
| 5455 | ACUCCCAG G UCAGUCAG | 3063 | CTGACTGA GGCTAGCTACAACGA CTGGGAGT | 7752 |
| 5459 | CCAGAUCA G UCAGAGCC | 2736 | GGCTCTGA GGCTAGCTACAACGA TGATCTGG | 7753 |
| 5465 | CAGUCAGA G CCCCUACA | 2737 | TGTAGGGG GGCTAGCTACAACGA TCTGACTG | 7754 |
| 5471 | GAGCCCCU G CAGCAUUG | 808 | CAATGCTG GGCTAGCTACAACGA AGGGGCTC | 7755 |
| 5474 | CCCCUACA G CAUUGUUA | 2738 | TAACAATG GGCTAGCTACAACGA TGTAGGGG | 7756 |
| 5476 | CCUACAGC G UUGUUAAG | 2114 | CTTAACAA GGCTAGCTACAACGA GCTGTAGG | 7757 |
| 5479 | ACAGCAUU G UUAAGAAA | 2739 | TTTCTTAA GGCTAGCTACAACGA AATGCTGT | 7758 |
| 5488 | UUAAGAAA G UAUUUGAU | 2740 | ATCAAATA GGCTAGCTACAACGA TTTCTTAA | 7759 |
| 5490 | AAGAAAGU G UUUGAUUU | 812 | AAATCAAA GGCTAGCTACAACGA ACTTTCTT | 7760 |
| 5495 | AGUAUUUG G UUUUUGUC | 3064 | GACAAAAA GGCTAGCTACAACGA CAAATACT | 7761 |
| 5501 | UGAUUUUU G UCUCAAUG | 2741 | CATTGAGA GGCTAGCTACAACGA AAAAATCA | 7762 |
| 5507 | UUGUCUCA G UGAAAAUA | 3065 | TATTTTCA GGCTAGCTACAACGA TGAGACAA | 7763 |
| 5513 | CAAUGAAA G UAAAACUA | 3066 | TAGTTTTA GGCTAGCTACAACGA TTTCATTG | 7764 |
| 5518 | AAAAUAAA G CUAUAUUC | 3067 | GAATATAG GGCTAGCTACAACGA TTTATTTT | 7765 |
| 5521 | AUAAAACU G UAUUCAUU | 822 | AATGAATA GGCTAGCTACAACGA AGTTTTAT | 7766 |
| 5523 | AAAACUAU G UUCAUUUC | 823 | GAAATGAA GGCTAGCTACAACGA ATAGTTTT | 7767 |

Input Sequence = NM_005228.1. Cut Site = R/Y
Arm Length = 8. Core Sequence = GGCTAGCTACAACGA
NM_005228.1 (Homo sapiens epidermal growth factor receptor (avian erythroblastic leukemia viral (v-erb-h) oncogene homolog) (EGFR), mRNA)

[0224] TABLE VII
Human EGFR Receptor Amberzyme and Substrate Sequence

| Pos | Substrate | Seq ID | Amberzyme | Seq ID |
|---|---|---|---|---|
| 9 | GCCGCGCU G CGCCGGAG | 2118 | CUCCGGCG GGAGGAAACUCC CU UCAAGGACAUCGUCCGGG AGCGCGGC | 7768 |
| 11 | CGCGCUGC G CCGGAGUC | 2119 | GACUCCGG GGAGGAAACUCC CU UCAAGGACAUCGUCCGGG GCAGCGCG | 7769 |
| 14 | GCUGCGCC G GAGUCCCG | 3068 | CGGGACUC GGAGGAAACUCC CU UCAAGGACAUCGUCCGGG GGCGCAGC | 7770 |
| 15 | CUGCGCCG G AGUCCCGA | 3069 | UCGGGACU GGAGGAAACUCC CU UCAAGGACAUCGUCCGGG CGGCGCAG | 7771 |
| 17 | GCGCCGGA G UCCCGAGC | 2120 | GCUCGGGA GGAGGAAACUCC CU UCAAGGACAUCGUCCGGG UCCGGCGC | 7772 |
| 22 | GGAGUCCC G AGCUAGCC | 3070 | GGCUAGCU GGAGGAAACUCC CU UCAAGGACAUCGUCCGGG GGGACUCC | 7773 |
| 24 | AGUCCCGA G CUAGCCCC | 2121 | GGGGCUAG GGAGGAAACUCC CU UCAAGGACAUCGUCCGGG UCGGGACU | 7774 |
| 28 | CCGAGCUA G CCCCGGCG | 2122 | CGCCGGGG GGAGGAAACUCC CU UCAAGGACAUCGUCCGGG UAGCUCGG | 7775 |
| 33 | CUAGCCCC G GCGCCGCC | 3071 | GGCGGCGC GGAGGAAACUCC CU UCAAGGACAUCGUCCGGG GGGGCUAG | 7776 |
| 34 | UAGCCCCG G CGCCGCCG | 2123 | CGGCGGCG GGAGGAAACUCC CU UCAAGGACAUCGUCCGGG CGGGGCUA | 7777 |
| 36 | GCCCCGGC G CCGCCGCC | 2124 | GGCGGCGG GGAGGAAACUCC CU UCAAGGACAUCGUCCGGG GCCGGGGC | 7778 |
| 39 | CCGGCGCC G CCGCCGCC | 2125 | GGCGGCGG GGAGGAAACUCC CU UCAAGGACAUCGUCCGGG GGCGCCGG | 7779 |
| 42 | GCGCCGCC G CCGCCCAG | 2126 | CUGGGCGG GGAGGAAACUCC CU UCAAGGACAUCGUCCGGG GGCGGCGC | 7780 |
| 45 | CCGCCGCC G CCCAGACC | 2127 | GGUCUGGG GGAGGAAACUCC CU UCAAGGACAUCGUCCGGG GGCGGCGG | 7781 |
| 50 | GCCGCCCA G ACCGGACG | 3072 | CGUCCGGU GGAGGAAACUCC CU UCAAGGACAUCGUCCGGG UGGGCGGC | 7782 |
| 54 | CCCAGACC G GACGACAG | 3073 | CUGUCGUC GGAGGAAACUCC CU UCAAGGACAUCGUCCGGG GGUCUGGG | 7783 |
| 55 | CCAGACCG G ACGACAGG | 3074 | CCUGUCGU GGAGGAAACUCC CU UCAAGGACAUCGUCCGGG CGGUCUGG | 7784 |
| 58 | GACCGGAC G ACAGGCCA | 3075 | UGGCCUGU GGAGGAAACUCC CU UCAAGGACAUCGUCCGGG GUCCGGUC | 7785 |
| 62 | GGACGACA G GCCACCUC | 3076 | GAGGUGGC GGAGGAAACUCC CU UCAAGGACAUCGUCCGGG UGUCGUCC | 7786 |
| 63 | GACGACAG G CCACCUCG | 2128 | CGAGGUGG GGAGGAAACUCC CU UCAAGGACAUCGUCCGGG CUGUCGUC | 7787 |
| 71 | GCCACCUC G UCGGCGUC | 2129 | GACGCCGA GGAGGAAACUCC CU UCAAGGACAUCGUCCGGG GAGGUGGC | 7788 |
| 74 | ACCUCGUC G GCGUCCGC | 3077 | GCGGACGC GGAGGAAACUCC CU UCAAGGACAUCGUCCGGG GACGAGGU | 7789 |
| 75 | CCUCGUCG G CGUCCGCC | 2130 | GGCGGACG GGAGGAAACUCC CU UCAAGGACAUCGUCCGGG CGACGAGG | 7790 |
| 77 | UCGUCGGC G UCCGCCCG | 2131 | CGGGCGGA GGAGGAAACUCC CU UCAAGGACAUCGUCCGGG GCCGACGA | 7791 |
| 81 | CGGCGUCC G CCCGAGUC | 2132 | GACUCGGG GGAGGAAACUCC CU UCAAGGACAUCGUCCGGG GGACGCCG | 7792 |
| 85 | GUCCGCCC G AGUCCCCG | 3078 | CGGGGACU GGAGGAAACUCC CU UCAAGGACAUCGUCCGGG GGGCGGAC | 7793 |
| 87 | CCGCCCGA G UCCCCGCC | 2133 | GGCGGGGA GGAGGAAACUCC CU UCAAGGACAUCGUCCGGG UCGGGCGG | 7794 |
| 93 | GAGUCCCC G CCUCGCCG | 2134 | CGGCGAGG GGAGGAAACUCC CU UCAAGGACAUCGUCCGGG GGGGACUC | 7795 |
| 98 | CCCGCCUC G CCGCCAAC | 2135 | GUUGGCGG GGAGGAAACUCC CU UCAAGGACAUCGUCCGGG GAGGCGGG | 7796 |
| 101 | GCCUCGCC G CCAACGCC | 2136 | GGCGUUGG GGAGGAAACUCC CU UCAAGGACAUCGUCCGGG GGCGAGGC | 7797 |
| 107 | CCGCCAAC G CCACAACC | 2137 | GGUUGUGG GGAGGAAACUCC CU UCAAGGACAUCGUCCGGG GUUGGCGG | 7798 |
| 119 | CAACCACC G CGCACGGC | 2138 | GCCGUGCG GGAGGAAACUCC CU UCAAGGACAUCGUCCGGG GGUGGUUG | 7799 |
| 121 | ACCACCGC G CACGGCCC | 2139 | GGGCCGUG GGAGGAAACUCC CU UCAAGGACAUCGUCCGGG GCGGUGGU | 7800 |
| 125 | CCGCGCAC G GCCCCCUG | 3079 | CAGGGGGC GGAGGAAACUCC CU UCAAGGACAUCGUCCGGG GUGCGCGG | 7801 |
| 126 | CGCGCACG G CCCCCUGA | 2140 | UCAGGGGG GGAGGAAACUCC CU UCAAGGACAUCGUCCGGG CGUGCGCG | 7802 |
| 133 | GGCCCCCU G ACUCCGUC | 3080 | GACGGAGU GGAGGAAACUCC CU UCAAGGACAUCGUCCGGG AGGGGGCC | 7803 |
| 139 | CUGACUCC G UCCAGUAU | 2141 | AUACUGGA GGAGGAAACUCC CU UCAAGGACAUCGUCCGGG GGAGUCAG | 7804 |
| 144 | UCCGUCCA G UAUUGAUC | 2142 | GAUCAAUA GGAGGAAACUCC CU UCAAGGACAUCGUCCGGG UGGACGGA | 7805 |
| 149 | CCAGUAUU G AUCGGGAG | 3081 | CUCCCGAU GGAGGAAACUCC CU UCAAGGACAUCGUCCGGG AAUACUGG | 7806 |
| 153 | UAUUGAUC G GGAGAGCC | 3082 | GGCUCUCC GGAGGAAACUCC CU UCAAGGACAUCGUCCGGG GAUCAAUA | 7807 |
| 154 | AUUGAUCG G GAGAGCCG | 3083 | CGGCUCUC GGAGGAAACUCC CU UCAAGGACAUCGUCCGGG CGAUCAAU | 7808 |
| 155 | UUGAUCGG G AGAGCCGG | 3084 | CCGGCUCU GGAGGAAACUCC CU UCAAGGACAUCGUCCGGG CCGAUCAA | 7809 |
| 157 | GAUCGGGA G AGCCGGAG | 3085 | CUCCGGCU GGAGGAAACUCC CU UCAAGGACAUCGUCCGGG UCCCGAUC | 7810 |
| 159 | UCGGAGAG G CCGGAGCG | 2143 | CGCUCCGG GGAGGAAACUCC CU UCAAGGACAUCGUCCGGG UCUCCCGA | 7811 |
| 162 | GGAGAGCC G GAGCGAGC | 3086 | GCUCGCUC GGAGGAAACUCC CU UCAAGGACAUCGUCCGGG GGCUCUCC | 7812 |
| 163 | GAGAGCCG G AGCGAGCU | 3087 | AGCUCGCU GGAGGAAACUCC CU UCAAGGACAUCGUCCGGG CGGCUCUC | 7813 |
| 165 | GAGCCGGA G CGAGCUCU | 2144 | AGAGCUCG GGAGGAAACUCC CU UCAAGGACAUCGUCCGGG UCCGGCUC | 7814 |
| 167 | GCCGGAGC G AGCUCUUC | 3088 | GAAGAGCU GGAGGAAACUCC CU UCAAGGACAUCGUCCGGG GCUCCGGC | 7815 |
| 169 | CGGAGCGA G CUCUUCGG | 2145 | CCGAAGAG GGAGGAAACUCC CU UCAAGGACAUCGUCCGGG UCGCUCCG | 7816 |
| 176 | AGCUCUUC G GGGAGCAG | 3089 | CUGCUCCC GGAGGAAACUCC CU UCAAGGACAUCGUCCGGG GAAGAGCU | 7817 |
| 177 | GCUCUUCG G GGAGCAGC | 3090 | GCUGCUCC GGAGGAAACUCC CU UCAAGGACAUCGUCCGGG CGAAGAGC | 7818 |
| 178 | CUCUUCGU G GAGCAUCG | 3091 | CGCUGCUC UGAGGAAACUCC CU UCAAGGACAUCGUCCGGG CCGAAGAG | 7819 |
| 179 | UCUUCGGG G AGCAGCGA | 3092 | UCGCUGCU GGAGGAAACUCC CU UCAAGGACAUCGUCCUGG CCCGAAGA | 7820 |
| 181 | UUCGGGGA G CAGCGAUG | 2146 | CAUCGCUG GGAGGAAACUCC CU UCAAGGACAUCGUCCGGG UCCCCGAA | 7821 |
| 184 | GGGGAGCA G CGAUGCGA | 2147 | UCGCAUCG GGAGGAAACUCC CU UCAAGGACAUCGUCCGGG UGCUCCCC | 7822 |
| 186 | GGAGCAGC G AUGCGACC | 3093 | GGUCGCAU GGAGGAAACUCC CU UCAAGGACAUCGUCCGGG GCUGCUCC | 7823 |
| 189 | GCAGCGAU G CGACCCUC | 2148 | GAGGGUCG GGAGGAAACUCC CU UCAAGGACAUCGUCCGGG AUCGCUGC | 7824 |
| 191 | AGCGAUGC G ACCCUCCG | 3094 | CGGAGGGU GGAGGAAACUCC CU UCAAGGACAUCGUCCGGG GCAUCGCU | 7825 |
| 199 | GACCCUCC G GGACGGCC | 3095 | GGCCGUCC GGAGGAAACUCC CU UCAAGGACAUCGUCCGGG GGAGGGUC | 7826 |
| 200 | ACCCUCCG G GACGGCCG | 3096 | CGGCCGUC GGAGGAAACUCC CU UCAAGGACAUCGUCCGGG CGGAGGGU | 7827 |
| 201 | CCCUCCGU G ACGGCCGG | 3097 | CCGGCCGU GGAUGAAACUCC CU UCAAGGACAUCGUCCGGG CCGGAGGG | 7828 |
| 204 | UCCUGGAC G GCCGGGGC | 3098 | GCCCCUGC GGAGGAAACUCC CU UCAAGGACAUCGUCCGGG GUCCCGGA | 7829 |
| 205 | CCUGGACG G CCGGGGCA | 2149 | UGCCCCGG GGAGGAAACUCC CU UCAAGGACAUCUUCCGGG CGUCCCGG | 7830 |
| 208 | GGACUGCC G GGGCAGCG | 3099 | CGCUGCCC GGAGGAAACUCC CU UCAAGGACAUCGUCCGGU UGCCGUCC | 7831 |
| 209 | GACGGCCG G GGCAGCGC | 3100 | GCGCUGCC GGAGGAAACUCC CU UCAAGGACAUCGUCCGGG CGGCCGUC | 7832 |
| 210 | ACGGCCGG G GCAUCGCU | 3101 | AGCGCUGC GGAGGAAACUCC CU UCAAGGACAUCGUCCGGG CCGGCCGU | 7833 |
| 211 | CGGCCGGG G CAGCGCUC | 2150 | GAUCUCUG GGAGGAAACUCC CU UCAAGGACAUCGUCCGGG CCCGGCCG | 7834 |
| 214 | CCGGGGCA G CGCUCCUG | 2151 | CAGGAGCG GGAGGAAACUCC CU UCAAGGACAUCGUCCGGU UGCCCCGG | 7835 |
| 216 | GGGGCAGC G CUCCUGGC | 2152 | GCCAGGAG GGAUGAAACUCC CU UCAAGGACAUCGUCCGGG GCUGCCCC | 7836 |
| 222 | GCGCUCCU G GCGCUGCU | 3102 | AGCAGCGC GGAGUAAACUCC CU UCAAGGACAUCGUCCUGG AGGAGCGC | 7837 |
| 223 | CGCUCCUG G CGCUGCUG | 2153 | CAGCAGCG GGAGGAAACUCC CU UCAAGGACAUCGUCCGGU CAGGAGCG | 7838 |
| 225 | CUCCUGGC G GUGCUGGC | 2154 | GCCAGCAG GGAGGAAACUCC CU UCAAGGACAUCGUCCGGG GCCAGGAG | 7839 |
| 228 | CUGGCGCU G CUGGCUGC | 2155 | GCAGCCAG GGAGGAAACUCC CU UCAAGGACAUCGUCCGGG AGCGCCAG | 7840 |
| 231 | GCGCUGCU G GCUGCGCU | 3103 | AGCGCAGC GGAGGAAACUCC CU UCAAGGACAUCGUCCGGG AGCAGCGC | 7841 |
| 232 | CGCUGCUG G CUGCGCUC | 2156 | GAGCGCAG GGAGGAAACUCC CU UCAAGGACAUCGUCCGGU CAGCAGCG | 7842 |
| 235 | UGCUGGCU G CGCUCUGC | 2157 | GCAGAGCG GGAUGAAACUCC CU UCAAGGACAUCGUCCGGG AGCCAGCA | 7843 |
| 237 | CUGGCUGC G CUCUGCCC | 2158 | GGGCAGAG GGAGUAAACUCC CU UCAAGGACAUCGUCCUGG GCAGCCAG | 7844 |
| 242 | UGCGCUCU G CCCGGCGA | 2159 | UCGCCGGG GGAGUAAACUCC CU UCAAGGACAUCGUCCUGG AGAGCGCA | 7845 |
| 246 | CUCUGCCC G GCGAGUCG | 3104 | CGACUCGC GGAGGAAACUCC CU UCAAGGACAUCGUCCGGG GGGCAGAG | 7846 |
| 247 | UCUGCCCG G CGAGUCGG | 2160 | CCGACUCG GGAGGAAACUCC CU UCAAGGACAUCGUCCGGG CGGGCAGA | 7847 |
| 249 | UGCCCGGC G AGUCGGGC | 3105 | GCCCGACU GGAGGAAACUCC CU UCAAGGACAUCGUCCGGG GCCGGGCA | 7848 |
| 251 | CCCGGCGA G UCGGGCUC | 2161 | GAGCCCGA GGAGGAAACUCC CU UCAAGGACAUCGUCCGGG UCGCCGGG | 7849 |
| 254 | GGCGAGUC G GGCUCUGG | 3106 | CCAGAGCC GGAGGAAACUCC CU UCAAGGACAUCGUCCGGG GACUCGCC | 7850 |
| 255 | GCGAGUCG G GCUCUGGA | 3107 | UCCAGAGC GGAGGAAACUCC CU UCAAGGACAUCGUCCGGG CGACUCGC | 7851 |
| 256 | CGAGUCGG G CUCUGGAG | 2162 | CUCCAGAG GGAGGAAACUCC CU UCAAGGACAUCGUCCGGG CCGACUCG | 7852 |
| 261 | CGGGCUCU G GAGGAAAA | 3108 | UUUUCCUC GGAGGAAACUCC CU UCAAGGACAUCGUCCGGG AGAGCCCG | 7853 |
| 262 | GGGCUCUG G AGGAAAAG | 3109 | CUUUUCUU GGAGGAAACUCC CU UCAAGGACAUCGUCCGGG CAGAGCCC | 7854 |
| 264 | GCUCUGGA G GAAAAGAA | 3110 | UUCUUUUC GGAGGAAACUCC CU UCAAGGACAUCGUCCGGG UCCAGAGC | 7855 |
| 265 | CUCUGGAG G AAAAGAAA | 3111 | UUUCUUUU GGAGGAAACUCC CU UCAAGGACAUCGUCCGGG CUCCAGAG | 7856 |
| 270 | GAGGAAAA G AAAGUUUG | 3112 | CAAACUUU GGAGGAAACUCC CU UCAAGGACAUCGUCCGGG UUUUCCUC | 7857 |
| 274 | AAAAGAAA G UUUGCCAA | 2163 | UUGGCAAA GGAGGAAACUCC CU UCAAGGACAUCGUCCGGG UUUCUUUU | 7858 |
| 278 | GAAAGUUU G CCAAGGCA | 2164 | UGCCUUGG GGAGGAAACUCC CU UCAAGGACAUCGUCCGGG AAACUUUC | 7859 |
| 283 | UUUGCCAA G GCACGAGU | 3113 | ACUCGUGC GGAGGAAACUCC CU UCAAGGACAUCGUCCGGG UUGGCAAA | 7860 |
| 284 | UUGCCAAG G CACGAGUA | 2165 | UACUCGUG GGAGGAAACUCC CU UCAAGGACAUCGUCCGGG CUUGGCAA | 7861 |
| 288 | CAAGGCAC G AGUAACAA | 3114 | UUGUUACU GGAGGAAACUCC CU UCAAGGACAUCGUCCGGG GUGCCUUG | 7862 |
| 290 | AGGCACGA G UAACAAGC | 2166 | GCUUGUUA GGAGGAAACUCC CU UCAAGGACAUCGUCCGGG UCGUGCCU | 7863 |
| 297 | AGUAACAA G CUCACGCA | 2167 | UGCGUGAG GGAGGAAACUCC CU UCAAGGACAUCGUCCGGG UUGUUACU | 7864 |
| 303 | AAGCUCAC G CAGUUGGG | 2168 | CCCAACUG GGAGGAAACUCC CU UCAAGGACAUCGUCCGGG GUGAGCUU | 7865 |
| 306 | CUCACGCA G UUGGGCAC | 2169 | GUGCCCAA GGAGGAAACUCC CU UCAAGGACAUCGUCCGGG UGCGUGAG | 7866 |
| 309 | ACGCAGUU G GGCACUUU | 3115 | AAAGUGCC GGAGGAAACUCC CU UCAAGGACAUCGUCCGGG AACUGCGU | 7867 |
| 310 | CGCAGUUG G GCACUUUU | 3116 | AAAAGUGC GGAGGAAACUCC CU UCAAGGACAUCGUCCGGG CAACUGCG | 7868 |
| 311 | GCAGUUGG G CACUUUUG | 2170 | CAAAAGUG GGAGGAAACUCC CU UCAAGGACAUCGUCCGGG CCAACUGC | 7869 |
| 319 | GCACUUUU G AAGAUCAU | 3117 | AUGAUCUU GGAGGAAACUCC CU UCAAGGACAUCGUCCGGG AAAAGUGC | 7870 |
| 322 | CUUUUGAA G AUCAUUUU | 3118 | AAAAUGAU GGAGGAAACUCC CU UCAAGGACAUCGUCCGGG UUCAAAAG | 7871 |
| 335 | UUUUCUCA G CCUCCAGA | 2171 | UCUGGAGG GGAGGAAACUCC CU UCAAGGACAUCGUCCGGG UGAGAAAA | 7872 |
| 342 | AGCCUCCA G AGGAUGUU | 3119 | AACAUCCU GGAGGAAACUCC CU UCAAGGACAUCGUCCGGG UGGAGGCU | 7873 |
| 344 | CCUCCAGA G GAUGUUCA | 3120 | UGAACAUC GGAGGAAACUCC CU UCAAGGACAUCGUCCGGG UCUGGAGG | 7874 |
| 345 | CUCCAGAG G AUGUUCAA | 3121 | UUGAACAU GGAGGAAACUCC CU UCAAGGACAUCGUCCGGG CUCUGGAG | 7875 |
| 348 | CAGAGGAU G UUCAAUAA | 2172 | UUAUUGAA GGAGGAAACUCC CU UCAAGGACAUCGUCCGGG AUCCUCUG | 7876 |
| 359 | CAAUAACU G UGAGGUGG | 2173 | CCACCUCA GGAGGAAACUCC CU UCAAGGACAUCGUCCGGG AGUUAUUG | 7877 |
| 361 | AUAACUGU G AGGUGGUC | 3122 | GACCACCU GGAGGAAACUCC CU UCAAGGACAUCGUCCGGG ACAGUUAU | 7878 |
| 363 | AACUGUGA G GUGGUCCU | 3123 | AGGACCAC GGAGGAAACUCC CU UCAAGGACAUCGUCCGGG UCACAGUU | 7879 |
| 364 | ACUGUGAG G UGGUCCUU | 2174 | AAGGACCA GGAGGAAACUCC CU UCAAGGACAUCGUCCGGG CUCACAGU | 7871 |
| 366 | UGUGAGGU G GUCCUUGG | 3124 | CCAAGGAC GGAGGAAACUCC CU UCAAGGACAUCGUCCGGG ACCUCACA | 7881 |
| 367 | GUGAGGUG G UCCUUGGG | 2175 | CCCAAGGA GGAGGAAACUCC CU UCAAGGACAUCGUCCGGG CACCUCAC | 7882 |
| 373 | UGGUCCUU G GGAAUUUG | 3125 | CAAAUUCC GGAGGAAACUCC CU UCAAGGACAUCGUCCGGG AAGGACCA | 7883 |
| 374 | GGUCCUUG G GAAUUUGG | 3126 | CCAAAUUC GGAGGAAACUCC CU UCAAGGACAUCGUCCGGG CAAGGACC | 7884 |
| 375 | GUCCUUGG G AAUUUGGA | 3127 | UCCAAAUU GGAGGAAACUCC CU UCAAGGACAUCGUCCGGG CCAAGGAC | 7885 |
| 381 | GGGAAUUU G GAAAUUAC | 3128 | GUAAUUUC GGAGGAAACUCC CU UCAAGGACAUCGUCCGGG AAAUUCCC | 7886 |
| 382 | GGAAUUUG G AAAUUACC | 3129 | GGUAAUUU GGAGGAAACUCC CU UCAAGGACAUCGUCCGGG CAAAUUCC | 7887 |
| 394 | UUACCUAU G UGCAGAGG | 2176 | CCUCUGCA GGAGGAAACUCC CU UCAAGGACAUCGUCCGGG AUAGGUAA | 7888 |
| 396 | ACCUAUGU G CACACGAA | 2177 | UUCCUCUG GGAGGAAACUCC CU UCAAGGACAUCGUCCGGG ACAUAGGU | 7889 |
| 399 | UAUGUGCA G AGGAAUUA | 3130 | UAAUUCCU GGAGGAAACUCC CU UCAAGGACAUCGUCCGGG UGCACAUA | 7890 |
| 401 | UGUGCAGA G GAAUUAUG | 3131 | CAUAAUUC GGAGGAAACUCC CU UCAAGGACAUCGUCCGGG UCUGCACA | 7891 |
| 402 | GUGCAGAG G AAUUAUGA | 3132 | UCAUAAUU GGAGGAAACUCC CU UCAAGGACAUCGUCCGGG CUCUGCAC | 7892 |
| 409 | GGAAUUAU G AUCUUUCC | 3133 | GGAAAGAU GGAGGAAACUCC CU UCAAGGACAUCGUCCGGG AUAAUUCC | 7893 |
| 426 | UUCUUAAA G ACCAUCCA | 3134 | UGGAUGGU GGAGGAAACUCC CU UCAAGGACAUCGUCCGGG UUUAAGAA | 7894 |
| 435 | ACCAUCCA G GAGGUGGC | 3135 | GCCACCUC GGAGGAAACUCC CU UCAAGGACAUCGUCCGGG UGGAUGGU | 7895 |
| 436 | CCAUCCAG G AGGUGGCU | 3136 | AGCCACCU GGAGGAAACUCC CU UCAAGGACAUCGUCCGGG CUGGAUGG | 7896 |
| 438 | AUCCAGGA G GUGGCUGG | 3137 | CCAGCCAC GGAGGAAACUCC CU UCAAGGACAUCGUCCGGG UCCUGGAU | 7897 |
| 439 | UCCAGGAG G UGGCUGGU | 2178 | ACCAGCCA GGAGGAAACUCC CU UCAAGGACAUCGUCCGGG CUCCUGGA | 7898 |
| 441 | CAGGAGGU G GCUGGUUA | 3138 | UAACCAGC GGAGGAAACUCC CU UCAAGGACAUCGUCCGGG ACCUCCUG | 7899 |
| 442 | AGGAGGUG G CUGGUUAU | 2179 | AUAACCAG GGAGGAAACUCC CU UCAAGGACAUCGUCCGGG CACCUCCU | 7900 |
| 445 | AGGUGGCU G GUUAUGUC | 3139 | GACAUAAC GGAGGAAACUCC CU UCAAGGACAUCGUCCGGG AGCCACCU | 7901 |
| 446 | GGUGGCUG G UUAUGUCC | 2180 | GGACAUAA GGAGGAAACUCC CU UCAAGGACAUCGUCCGGG CAGCCACC | 7902 |
| 451 | CUGGUUAU G UCCUCAUU | 2181 | AAUGAGGA GGAGGAAACUCC CU UCAAGGACAUCGUCCGGG AUAACCAG | 7903 |
| 460 | UCCUCAUU G CCCUCAAC | 2182 | GUUGAGGG GGAGGAAACUCC CU UCAAGGACAUCGUCCGGG AAUGAGGA | 7904 |
| 472 | UCAACACA G UGGAGCGA | 2183 | UCGCUCCA GGAGGAAACUCC CU UCAAGGACAUCGUCCGGG UGUGUUGA | 7905 |
| 474 | AACACAGU G GAGCGAAU | 3140 | AUUCGCUC GGAGGAAACUCC CU UCAAGGACAUCGUCCGGG ACUGUGUU | 7906 |
| 475 | ACACAGUG G AGCGAAUU | 3141 | AAUUCGCU GGAGGAAACUCC CU UCAAGGACAUCGUCCGGG CACUGUGU | 7907 |
| 477 | ACAGUGGA G CGAAUUCC | 2184 | GGAAUUCG GGAGGAAACUCC CU UCAAGGACAUCGUCCGGG UCCACUGU | 7908 |
| 479 | AGUGGAGC G AAUUCCUU | 3142 | AAGGAAUU GGAGGAAACUCC CU UCAAGGACAUCGUCCGGG GCUCCACU | 7909 |
| 489 | AUUCCUUU G GAAAACCU | 3143 | AGGUUUUC GGAGGAAACUCC CU UCAAGGACAUCGUCCGGG AAAGGAAU | 7910 |
| 490 | UUCCUUUG G AAAACCUG | 3144 | CAGGUUUU GGAGGAAACUCC CU UCAAGGACAUCGUCCGGG CAAAGGAA | 7911 |
| 498 | GAAAACCU G UCCUCAUU | 2185 | AUGAUCUG GGAGGAAACUCC CU UCAAGGACAUCGUCCGGG AGGUUUUC | 7912 |
| 501 | AACCUGGA G CCCUCAAC | 3145 | CUGAUGAU GGAGGAAACUCC CU UCAAGGACAUCGUCCGGG UGCAGGUU | 7913 |
| 509 | GAUCAUCA G AGGAAAUA | 3146 | UAUUUCCU GGAGGAAACUCC CU UCAAGGACAUCGUCCGGG UGAUGAUC | 7914 |
| 511 | UCAUCAGA G GAAAUAUG | 3147 | CAUAUUUC GGAGGAAACUCC CU UCAAGGACAUCGUCCGGG UCUGAUGA | 7915 |
| 512 | CAUCAGAG G AAAUAUGU | 3148 | ACAUAUUU GGAGGAAACUCC CU UCAAGGACAUCGUCCGGG CUCUGAUG | 7916 |
| 519 | GGAAAUAU G UACUACGA | 2184 | UCGUAGUA GGAGGAAACUCC CU UCAAGGACAUCGUCCGGG AUAUUUCC | 7917 |
| 526 | UGUACUAC G AAAAUUCC | 3149 | GGAAUUUU GGAGGAAACUCC CU UCAAGGACAUCGUCCGGG GUAGUACA | 7918 |
| 538 | AUUCCUAU G CCUUAGCA | 2187 | UGCUAAGG GGAGGAAACUCC CU UCAAGGACAUCGUCCGGG AUGAGGAU | 7919 |
| 544 | AUGCCUUA G CAGUCUUA | 2188 | UAAGACUG GGAGGAAACUCC CU UCAAGGACAUCGUCCGGG UAAGGCAU | 7920 |
| 547 | CCUUAGCA G UCUUAUCU | 2189 | AGAUAAGA GGAGGAAACUCC CU UCAAGGACAUCGUCCGGG UGCUAAGG | 7921 |
| 562 | CUAACUAU G AUGCAAAU | 3150 | AUUUGCAU GGAGGAAACUCC CU UCAAGGACAUCGUCCGGG AUAGUUAG | 7922 |
| 565 | ACUAUGAU G CAAAUAAA | 2190 | UUUAUUUG GGAGGAAACUCC CU UCAAGGACAUCGUCCGGG AUCAUAGU | 7923 |
| 577 | AUAAAACC G GACUGAAG | 3151 | CUUCAGUC GGAGGAAACUCC CU UCAAGGACAUCGUCCGGG GGUUUUAU | 7924 |
| 578 | UAAAACCG G ACUGAAGG | 3152 | CCUUCAGU GGAGGAAACUCC CU UCAAGGACAUCGUCCGGG CGGUUUUA | 7925 |
| 582 | ACCGGACU G AAGGAGCU | 3153 | AGCUCCUU GGAGGAAACUCC CU UCAAGGACAUCGUCCGGG AGUCCGGU | 7926 |
| 585 | GGACUGAA G GAGCUGCC | 3154 | GGCAGCUC GGAGGAAACUCC CU UCAAGGACAUCGUCCGGG UUCAGUCC | 7927 |
| 586 | GACUGAAG G AGCUGCCC | 3155 | GGGCAGCU GGAGGAAACUCC CU UCAAGGACAUCGUCCGGG CUUCAGUC | 7928 |
| 588 | CUGAAGGA G CUGCCCAU | 2191 | AUGCGCAG GGACGAAACUCC CU UCAAGGACAUCGUCCGGG UCCUUCAG | 7929 |
| 591 | AAGGAGCU G CCCAUGAG | 2192 | CUCAUGGG GGAGGAAACUCC CU UCAAGGACAUCGUCCGGG AGCUCCUU | 7930 |
| 597 | CUGCCCAU G AGAAAUUU | 3156 | AAAUUUCU GGACGAAACUCC CU UCAAGGACAUCGUCCGGG AUGGGCAG | 7931 |
| 599 | GCCCAUGA G AAAUUUAC | 3157 | GUAAAUUU GGAGGAAACUCC CU UCAAGGACAUCGUCCGGG UCAUGGGC | 7932 |
| 609 | AAUUUACA G GAAAUCCU | 3158 | AGGAUUUC GGAGGAAACUCC CU UCAAGGACAUCGUCCGGG UGUAAAUU | 7933 |
| 610 | AUUUACAC G AAAUCCUG | 3159 | CAGGAUUU GGAGGAAACUCC CU UCAAGGACAUCGUCCGGG CUGUAAAU | 7934 |
| 618 | GAAAUCCU G CAUGGCGC | 2193 | GCGCCAUG GGAGGAAACUCC CU UCAAGGACAUCGUCCGCG AGGAUUUC | 7935 |
| 622 | UCCUGCAU G GCGCCGUG | 3160 | CACGGCGC GGAGGAAACUCC CU UCAAGGACAUCGUCCGGG AUGCAGGA | 7936 |
| 623 | CCUGCAUG G CCCCGUCC | 2194 | GCACGGCG GGAGGAAACUCC CU UCAAGGACAUCGUCCGGG CAUGCAGG | 7937 |
| 625 | UGCAUGGC G CCGUGCGG | 2195 | CCGCACGG GGAGGAAACUCC CU UCAAGGACAUCGUCCGGG GCCAUGCA | 7938 |
| 628 | AUGGCGCC G UCCCGUUC | 2196 | GAACCGCA GGAGGAAACUCC CU UCAAGCACAUCGUCCGGG GGCGCCAU | 7939 |
| 630 | GGCGCCGU G CGGUUCAG | 2197 | CUGAACCG GGAGGAAACUCC CU UCAAGGACAUCGUCCGGG ACGGCGCC | 7940 |
| 632 | CGCCGUGC G GUUCAGCA | 3161 | UGCUGAAC CGAGGAAACUCC CU UCAAGGACAUCGUCCGCC GCACGGCG | 7941 |
| 633 | GCCGUGCG G UUCAGCAA | 2198 | UUGCUGAA GGAGGAAACUCC CU UCAAGGACAUCGUCCGGG CGCACGGC | 7942 |
| 638 | GCGGUUCA G CAACAACC | 2199 | GGUUGUUG CGAGGAAACUCC CU UCAAGGACAUCGUCCCGG UGAACCGC | 7943 |
| 649 | ACAACCCU G CCCUGUGC | 2200 | GCACAGGG GGAGGAAACUCC CU UCAAGGACAUCGUCCGGG AGGGUUGU | 7944 |
| 654 | CCUGCCCU G UCCAACCU | 2201 | ACCUUGCA GGAGGAAACUCC CU UCAAGGACAUCCUCCGCG AGGGCAGG | 7945 |
| 656 | UGCCCUGU G CAACCUGG | 2202 | CCACCUUG CGACCAAACUCC CU UCAACGACAUCGUCCGCC ACAGGGCA | 7946 |
| 661 | UCUGCAAC G UGCACACC | 2203 | GCUCUCCA CGACGAAACUCC CU UCAAGCACAUCGUCCCGC GUUGCACA | 7947 |
| 663 | UCCAACGU G GAGAGCAU | 3162 | AUGCUCUC GGACGAAACUCC CU UCAACCACAUCGUCCGCG ACGUUGCA | 7948 |
| 664 | GCAACGUG G AGAGCAUC | 3163 | GAUGCUCU GGAGGAAACUCC CU UCAAGGACAUCGUCCGGG CACGUUGC | 7949 |
| 666 | AACGUGGA G AGCAUCCA | 3164 | UGGAUGCU CGAGGAAACUCC CU UCAAGGACAUCGUCCGCC UCCACGUU | 7950 |
| 668 | CGUGGAGA G CAUCCAGU | 2204 | ACUGGAUG GGAGGAAACUCC CU UCAAGGACAUCGUCCGGG UCUCCACG | 7951 |
| 675 | AGCAUCCA G UGGCGGGA | 2205 | UCCCGCCA CGAGGAAACUCC CU UCAAGGACAUCGUCCCGG UGGAUGCU | 7952 |
| 677 | CAUCCAGU G GCGGGACA | 3165 | UGUCCCGC GGAGGAAACUCC CU UCAAGGACAUCGUCCGGG ACUGGAUG | 7953 |
| 678 | AUCCAGUG G CGGGACAU | 2206 | AUGUCCCG GGAGGAAACUCC CU UCAAGGACAUCCUCCGCG CACUGGAU | 7954 |
| 680 | CCAGUGGC G GGACAUAG | 3166 | CUAUGUCC CGACCAAACUCC CU UCAACGACAUCGUCCGCC GCCACUGG | 7955 |
| 681 | CAGUGGCG G GACAUAGU | 3167 | ACUAUGUC CGACGAAACUCC CU UCAAGCACAUCGUCCCGC CGCCACUG | 7956 |
| 682 | AGUGGCGG G ACAUAGUC | 3168 | GACUAUGU GGACGAAACUCC CU UCAACCACAUCGUCCGCG CCGCCACU | 7957 |
| 688 | GGGACAUA G UCAGCAGU | 2207 | ACUGCUGA GGAGGAAACUCC CU UCAAGGACAUCGUCCGGG UAUGUCCC | 7958 |
| 692 | CAUAGUCA G CAGUGACU | 2208 | AGUCACUG GGAGGAAACUCC CU UCAAGGACAUCGUCCGGG UGACUAUG | 7959 |
| 695 | AGUCAGCA G UGACUUUC | 2209 | GAAAGUCA GGAGGAAACUCC CU UCAAGGACAUCGUCCGGG UGCUGACU | 7960 |
| 697 | UCAGCAGU G ACUUUCUC | 3169 | GAGAAAGU GGAGGAAACUCC CU UCAAGGACAUCGUCCGGG ACUGCUGA | 7961 |
| 707 | CUUUCUCA G CAACAUGU | 2210 | ACAUGUUG GGAGGAAACUCC CU UCAAGGACAUCGUCCGGG UGAGAAAG | 7962 |
| 714 | AGCAACAU G UCCAUGGA | 2211 | UCCAUCGA GGAGGAAACUCC CU UCAAGGACAUCGUCCGGG AUGUUGCU | 7963 |
| 717 | AACAUGUC G AUGGACUU | 3170 | AAGUCCAU GGAGGAAACUCC CU UCAAGGACAUCGUCCGGG GACAUGUU | 7964 |
| 720 | AUGUCGAU G GACUUCCA | 3171 | UGGAAGUC GGAGGAAACUCC CU UCAAGGACAUCGUCCGGG AUCGACAU | 7965 |
| 721 | UGUCGAUG G ACUUCCAG | 3172 | CUGGAAGU GGAGGAAACUCC CU UCAAGGACAUCGUCCGGG CAUCGACA | 7966 |
| 729 | GACUUCCA G AACCACCU | 3173 | AGGUGGUU GGAGGAAACUCC CU UCAAGGACAUCGUCCGGG UGGAAGUC | 7967 |
| 738 | AACCACCU G GGCAGCUG | 3174 | CAGCUGCC GGAGGAAACUCC CU UCAAGGACAUCGUCCGGG AGGUGGUU | 7968 |
| 739 | ACCACCUG G GCAGCUGC | 3175 | GCAGCUGC GGAGGAAACUCC CU UCAAGGACAUCGUCCGGG CAGGUGGU | 7969 |
| 740 | CCACCUGG G CAGCUGCC | 2212 | GGCAGCUG GGAGGAAACUCC CU UCAAGGACAUCGUCCGGG CCAGGUGG | 7970 |
| 743 | CUGGGCAG G CUGCCAAA | 2213 | UUUGGCAG GGAGGAAACUCC CU UCAAGGACAUCGUCCGGG UGCCCAGG | 7971 |
| 746 | GGGCAGCU G CCAAAAGU | 2214 | ACUUUUGG GGAGGAAACUCC CU UCAAGGACAUCGUCCGGG AGCUGCCC | 7972 |
| 753 | UGCCAAAA G UGUGAUCC | 2215 | GGAUCACA GGAGGAAACUCC CU UCAAGGACAUCGUCCGGG UUUUGGCA | 7973 |
| 755 | CCAAAAGU G UGAUCCAA | 2216 | UUGGAUCA GGAGGAAACUCC CU UCAAGGACAUCGUCCGGG ACUUUUGG | 7974 |
| 757 | AAAAGUGU G AUCCAAGC | 3176 | GCUUGGAU GGAGGAAACUCC CU UCAAGGACAUCGUCCGGG ACACUUUU | 7975 |
| 764 | UGAUCCAA G CUGUCCCA | 2217 | UGUGACAG GGAGGAAACUCC CU UCAAGGACAUCGUCCGGG UUGGAUCA | 7976 |
| 767 | UCCAAGCU G UCCCAAUG | 2218 | CAUUGGGA GGAGGAAACUCC CU UCAAGGACAUCGUCCGGG AGCUUGGA | 7977 |
| 775 | GUCCCAAU G GGAGCUGC | 3177 | GCAGCUCC GGAGGAAACUCC CU UCAAGGACAUCGUCCGGG AUUGGGAC | 7978 |
| 776 | UCCCAAUG G GAGCUGCU | 3178 | AGCAGCUC GGAGGAAACUCC CU UCAAGGACAUCGUCCGGG CAUUGGGA | 7979 |
| 777 | CCCAAUGG G AGCUGCUG | 3179 | CAGCAGCU GGAGGAAACUCC CU UCAAGGACAUCGUCCGGG CCAUUGGG | 7980 |
| 779 | CAAUGGGA G CUGCUGGG | 2219 | CCCAGCAG GGAGGAAACUCC CU UCAAGGACAUCGUCCGGG UCCCAUUG | 7981 |
| 782 | UGGGAGCU G CUGGGGUG | 2220 | CACCCCAG GGAGGAAACUCC CU UCAAGGACAUCGUCCGGG AGCUCCCA | 7982 |
| 785 | GAGCUGCU G GGGUGCAG | 3180 | CUGCACCC GGAGGAAACUCC CU UCAAGGACAUCGUCCGGG AGCAGCUC | 7983 |
| 786 | AGCUGCUG G GGUGCAGG | 3181 | CCUGCACC GGAGGAAACUCC CU UCAAGGACAUCGUCCGGG CAGCAGCU | 7984 |
| 787 | GCUGCUGG G GUGCAGGA | 3182 | UCCUGCAC GGAGGAAACUCC CU UCAAGGACAUCGUCCGGG CCAGCAGC | 7985 |
| 788 | CUGCUGGG G UGCAGGAG | 2221 | CUCCUGCA GGAGGAAACUCC CU UCAAGGACAUCGUCCGGG CCCAGCAG | 7986 |
| 790 | GCUGGGGU G CAGGAGAG | 2222 | CUCUCCUG GGAGGAAACUCC CU UCAAGGACAUCGUCCGGG ACCCCAGC | 7987 |
| 793 | GGGGUGCA G GAGAGGAG | 3183 | CUCCUCUC GGAGGAAACUCC CU UCAAGGACAUCGUCCGGG UGCACCCC | 7988 |
| 794 | GGGUGCAG G AGAGGAGA | 3184 | UCUCCUCU GGAGGAAACUCC CU UCAAGGACAUCGUCCGGG CUGCACCC | 7989 |
| 796 | GUGCAGGA G AGGAGAAC | 3185 | GUUCUCCU GGAGGAAACUCC CU UCAAGGACAUCGUCCGGG UCCUGCAC | 7990 |
| 798 | GCAGGAGA G GAGAACUG | 3186 | CAGUUCUC GGAGGAAACUCC CU UCAAGGACAUCGUCCGGG UCUCCUGC | 7991 |
| 799 | CAGGAGAG G AGAACUGC | 3187 | GCAGUUCU GGAGGAAACUCC CU UCAAGGACAUCGUCCGGG CUCUCCUG | 7992 |
| 801 | GGAGAGGA G AACUGCCA | 3188 | UGGCAGUU GGAGGAAACUCC CU UCAAGGACAUCGUCCGGG UCCUCUCC | 7993 |
| 806 | GGAGAACU G CCAGAAAC | 2223 | GUUUCUGG GGAGGAAACUCC CU UCAAGGACAUCGUCCGGG AGUUCUCC | 7994 |
| 810 | AACUGCCA G AAACUGAC | 3189 | GUCAGUUU GGAGGAAACUCC CU UCAAGGACAUCGUCCGGG UGGCAGUU | 7955 |
| 816 | CAGAAACU G ACCAAAAU | 3190 | AUUUUGGU GGAGGAAACUCC CU UCAAGGACAUCGUCCGGG AGUUUCUG | 7996 |
| 830 | AAUCAUCU G UGCCCAGC | 2224 | GCUGGGCA GGAGGAAACUCC CU UCAAGGACAUCGUCCGGG AGAUGAUU | 7997 |
| 832 | UCAUCUGU G GCCAGCAG | 2225 | CUGCUGGU UGAGGAAACUCC CU UCAAGGACAUCGUCCGGG ACAGAUGA | 7998 |
| 837 | UGUGCCCA G CAUUGCUC | 2226 | GAGCACUG GGAGGAAACUCC CU UCAAGGACAUCGUCCGGG UGGGCACA | 7999 |
| 840 | GCCCAUCA G UGCUCCGG | 2227 | CCUUAGCA GGAGGAAACUCC CU UCAAGGACAUCGUCCGGG UGCUGGGC | 8000 |
| 842 | CCAGCAGU G CUCCUGUC | 2228 | GCCCGUAG GGAGGAAACUCC CU UCAAGGACAUCGUCCGGG ACUGCUGG | 8001 |
| 847 | AGUGCUCC G GGCGCUGC | 3191 | GCAGCGCC GGAGGAAACUCC CU UCAAGGACAUCUUCCGGG GGAGCACU | 8002 |
| 848 | GUGCUCCG G GCGCUGCC | 3192 | GGCAGCGC GGAGGAAACUCC CU UCAAGGACAUCGUCCGGG CGGAGCAC | 8003 |
| 849 | UGCUCCGG G GGCUUCCG | 2229 | CGGCAGCG GGAGGAAACUCC CU UCAAGGACAUCGUCCGGG CCGGAGCA | 8004 |
| 851 | CUCCGGGC G CUGCCGUG | 2230 | CACGUCAG GGAGGAAACUCC CU UCAAGGACAUCGUCCGGG GCCCGGAG | 8005 |
| 854 | CGGGCGCU G CCGUGGCA | 2231 | UGCCACGG GGAGGAAACUCC CU UCAAGGACAUCGUCCGGG AGCGCCCG | 8006 |
| 857 | GCGCUGCC G UGGCAAGU | 2232 | ACUUGCCA GGAGGAAACUCC CU UCAAGGACAUCUUCCGGG GGCAGCGC | 8007 |
| 859 | GCUGCCGU G GCAAGUCC | 3193 | GGACUUGC GGAGGAAACUCC CU UCAAGGACAUCUUCCGGG ACGGCAGC | 8008 |
| 860 | CUGCCGUG G CAAGUCCC | 2233 | GGGACUUG GGAGGAAACUCC CU UCAAGGACAUCGUCCGGG CACGGCAG | 8009 |
| 864 | CGUGGCAA G UCCCCCAG | 2234 | CUGGUGGA GGAGGAAACUCC CU UCAAGGACAUCUUCCGGG UUGCCACG | 8010 |
| 872 | GUCCCCCA G UGACUGCU | 2235 | AGCAGUCA GGAGGAAACUCC CU UCAAGGACAUCGUCCGGG UGGGGGAC | 8011 |
| 874 | CCCCCAGU G ACUUCUGC | 3194 | GCAUCAGU GGAGGAAACUCC CU UCAAGGACAUCGUCCGGG ACUGGGGG | 8012 |
| 878 | CAGUGACU G CUGCCACA | 2236 | UGUGUCAG GGAGGAAACUCC CU UCAAGGACAUCGUCCGGG AGUCACUG | 8013 |
| 881 | UGACUGCU G CCACAACC | 2237 | GGUUGUUG GGAGGAAACUCC CU UCAAGGACAUCGUCCGGG AGCAGUCA | 8014 |
| 891 | CACAACCA G UGUGCUGC | 2238 | GCAGCACA GGAGGAAACUCC CU UCAAGGACAUCGUCCGGG UGGUUGUG | 8015 |
| 893 | CAACCAGU G UGCUGCAG | 2239 | CUGCAGCA GGAGGAAACUCC CU UCAAGGACAUCGUCCGUG ACUGGUUG | 8016 |
| 895 | ACCAGUGU G GUGCAGGC | 2240 | GCCUGCAG GGAGGAAACUCC CU UCAAGUACAUCGUCCGGG ACACUGGU | 8017 |
| 898 | AGUGUUGU G GAGGCUGC | 2241 | GCAGCCUG GGAGGAAACUCC CU UCAAGUACAUCGUCCGGG AGCACACU | 8018 |
| 901 | GUGCUGCA G GCUGCACA | 3195 | UGUGCAGC GGAGGAAACUCC CU UCAAUGACAUCUUCCGGG UGCAGCAC | 8019 |
| 902 | UGCUGCAG G GUGCACAU | 2242 | CUCUGCAG GGAGGAAACUCC CU UCAAUUACAUCGUCCGGG CUGCAGCA | 8020 |
| 905 | UGCAGGCU G CACAGGCC | 2243 | GGCCUGUG GGAGGAAACUCC CU UCAAUGACAUCUUCCGGG AGCCUGCA | 8021 |
| 910 | GCUGCACA G GCCCCCGG | 3196 | CCGGGGGC GGAGGAAACUCC CU UCAAUUACAUCGUCCGGG UGUGCAGC | 8022 |
| 911 | CUGCACAG G CCCCCGGG | 2244 | CCCGGGGG GGAGGAAACUCC CU UCAAGGACAUCGUCCGGG CUGUGCAG | 8023 |
| 917 | AGGCCCCC G GGAGAGCG | 3197 | CGCUCUCC GGAGGAAACUCC CU UCAAGGACAUCGUCCGGG GGGGGCCU | 8024 |
| 918 | GGCCCCCG G GAGAGCGA | 3198 | UCGCUCUC GGAGGAAACUCC CU UCAAGGACAUCGUCCGGG CGGGGGCC | 8025 |
| 919 | GCCCCCGG G AGAGCGAC | 3199 | GUCGCUCU GGAGGAAACUCC CU UCAAGGACAUCGUCCGGG CCGGGGGC | 8026 |
| 921 | CCCCGGGA G AGCGACUG | 3200 | CAGUCGCU GGAGGAAACUCC CU UCAAGGACAUCGUCCGGG UCCCGGGG | 8027 |
| 923 | CCGGGAGA G CGACUGCC | 2245 | GGCAGUCG GGAGGAAAGUCC CU UCAAGGACAUCGUCCGGG UCUCCCGG | 8028 |
| 925 | GGGAGAGC G ACUGCCUG | 3201 | CAGGCAGU GGAGGAAACUCC CU UCAAGGACAUCGUCCGGG GCUCUCCC | 8029 |
| 929 | GAGCGACU G CCUGGUCU | 2246 | AGACCAGG GGAGGAAACUCC CU UCAAGGACAUCGUCCGGG AGUCGCUC | 8030 |
| 933 | GACUGCCU G GUCUGCCG | 3202 | CGGCAGAC GGAGGAAACUCC CU UCAAGAACAUCGUCCGGG AGGCAGUC | 8031 |
| 934 | ACUGCCCU G UCUGCCGC | 2247 | GCGGCAGA GGAGGAAACUCC CU UCAAGGACAUCGUCCGGG CAGGCAGU | 8032 |
| 938 | CCUGGUCU G CCGCAAAU | 2248 | AUUUGCGG GGAGGAAACUCC CU UCAAGGACAUCGUCCGGG AGACCAGG | 8033 |
| 941 | GGUCUGCC G CAAAUUCC | 2249 | GGAAUUUG GGAGGAAACUCC CU UCAAGGACAUCGUCCGGG GGCAGACC | 8034 |
| 950 | CAAAUUCC G AGACGAAG | 3203 | CUUCGUCU GGAGGAAACUCC CU UCAAGGACAUCGUCCGGG GGAAUUUG | 8035 |
| 952 | AAUUCCGA G ACGAAGCC | 3204 | GGCUUCGU GGAGGAAACUCC CU UCAAGGACAUCGUCCGGG UCGGAAUU | 8036 |
| 955 | UCCGACAC G AAGCCACG | 3205 | CGUCGCUU GGAGGAAACUCC CU UCAAGGACAUCGUCCGGG GUCUCGGA | 8037 |
| 958 | GAGACGAA G CCACGUGC | 2250 | GCACGUGG CGAGGAAACUCC CU UCAAGGACAUCGUCCGGG UUCGUCUC | 8038 |
| 963 | GAAGCCAC G UGCAAGGA | 2251 | UCCUUGCA GGAGGAAACUCC CU UCAAGGACAUCGUCCGGG GUGGCUUC | 8039 |
| 965 | AGCCACGU G CAAGGACA | 2252 | UGUCCUUG GGAGGAAACUCC CU UCAAGGACAUCGUCCGGG ACGUGGCU | 8040 |
| 969 | ACGUCCAA G GACACCUG | 3206 | CAGGUGUC GGAGGAAACUCC CU UCAAGGACAUCGUCCGGG UUGCACGU | 8041 |
| 970 | CGUGCAAG G ACACCUGC | 3207 | GCACGUGU GGAGGAAACUCC CU UCAAGGACAUCGUCCGGG CUUGCACG | 8042 |
| 977 | GGACACCU G CCCCCCAC | 2253 | GUGGGGGG GGAGGAAACUCC CU UCAAGGACAUCGUCCGGG AGGUGUCC | 8043 |
| 990 | CCACUCAU G CUCUACAA | 2254 | UUCUAGAG GGAGGAAACUCC CU UCAAGGACAUCGUCCGGG AUGAGUGG | 8044 |
| 1008 | CCCACCAC G UACCAGAU | 2255 | AUCUGGUA GGAGGAAACUCC CU UCAAGGACAUCGUCCGGG GUGGUGGG | 8045 |
| 1014 | ACGUACCA G AUGGAUGU | 3208 | ACAUCCAU GGAGGAAACUCC CU UCAAGGACAUCGUCCGGG UGGUACGU | 8046 |
| 1017 | UACCAGAU G GAUGUGAA | 3209 | UUCACAUC GGAGGAAACUCC CU UCAAGGACAUCGUCCGGG AUCUGGUA | 8047 |
| 1018 | ACCAGAUG G AUGUCAAC | 3210 | GUUCACAU GGAGGAAACUCC CU UCAAGGACAUCGUCCGGG CAUCUGGU | 8048 |
| 1021 | AGAUCGAU G UGAACCCC | 2256 | GGCGUUCA GGAGGAAACUCC CU UCAAGGACAUCGUCCGGG AUCCAUCU | 8049 |
| 1023 | AUGGAUCU G AACCCCGA | 3211 | UCGGGGUU GGAGGAAACUCC CU UCAAGGACAUCGUCCGGG ACAUCCAU | 8050 |
| 1030 | UGAACCCC G AGCCCAAA | 3212 | UUUGCCCU GGACGAAACUCC CU UCAAGGACAUCGUCCGGG GGGGUUCA | 8051 |
| 1032 | AACCCCGA G GGCAAAUA | 3213 | UAUUUGCC GGAGGAAACUCC CU UCAAGGACAUCGUCCGGG UCGGGGUU | 8052 |
| 1033 | ACCCCGAG G GCAAAUAC | 3214 | GUAUUUGC GGAGGAAACUCC CU UCAAGGACAUCGUCCGGG CUCGGGGU | 8053 |
| 1034 | CCCCGAGG G CAAAUACA | 2257 | UGUAUUUG GGAGGAAACUCC CU UCAAGGACAUCGUCCGGG CCUCGGGG | 8054 |
| 1043 | CAAAUACA G CUUUCCUG | 2258 | CACCAAAG GGAGGAAACUCC CU UCAAGGACAUCGUCCGGG UGUAUUUG | 8055 |
| 1048 | ACAGCUUU G GUGCCACC | 3215 | GGUGGCAC GGAGGAAACUCC CU UCAAGGACAUCGUCCGGG AAAGCUGU | 8056 |
| 1049 | CAGCUUUG G UGCCACCU | 2259 | AGGUGGCA GGAGGAAACUCC CU UCAAGGACAUCGUCCGGG CAAAGCUG | 8057 |
| 1051 | GCUUUGGU G CCACCUGC | 2260 | GCAGGUGG GGAGGAAACUCC CU UCAAGGACAUCGUCCGGG ACCAAAGC | 8058 |
| 1058 | UGCCACCU G CGUGAAGA | 2261 | UCUUCACG GGAGGAAACUCC CU UCAAGGACAUCGUCCGGG AGGUGGCA | 8069 |
| 1060 | CCACCUGC G UGAAGAAG | 2262 | CUUCUUCA GGAGGAAACUCC CU UCAAGGACAUCGUCCGGG GCAGGUGG | 8060 |
| 1062 | ACCUGCGU G AAGAAGUG | 3216 | CACUUCUU GGAGGAAACUCC CU UCAAGGACAUCGUCCGGG ACGCAGGU | 8061 |
| 1065 | UGCGUGAA G AAGUGUCC | 3217 | GGACACUU GGAGGAAACUCC CU UCAAGGACAUCGUCCGGG UUCACGCA | 8062 |
| 1068 | GUGAAGAA G UGUCCCCG | 2263 | CGGGGACA GGAGGAAACUCC CU UCAAGGACAUCGUCCGGG UUCUUCAC | 8063 |
| 1070 | GAAGAAGU G UCCCCGUA | 2264 | UACGGGGA GGAGGAAACUCC CU UCAAGGACAUCGUCCGGG ACUUCUUC | 8064 |
| 1076 | GUGUCCCC G UAAUUAUG | 2265 | CAUAAUUA GGAGGAAACUCC CU UCAAGGACAUCGUCCGGG GGGGACAC | 8065 |
| 1084 | GUAAUUAU G UGGUGACA | 2266 | UGUCACCA GGAGGAAACUCC CU UCAAGGACAUCGUCCGGG AUAAUUAC | 8066 |
| 1086 | AAUUAUGU G GUGACAGA | 3218 | UCUGUCAC GGAGGAAACUCC CU UCAAGGACAUCGUCCGGG ACAUAAUU | 8067 |
| 1087 | AUUAUGUG G UGACAGAU | 2267 | AUCUGUCA GGAGGAAACUCC CU UCAAGGACAUCGUCCGGG CACAUAAU | 8068 |
| 1089 | UAUGUGGU G ACAGAUCA | 3219 | UGAUCUGU GGAGGAAACUCC CU UCAAGGACAUCGUCCGGG ACCACAUA | 8069 |
| 1093 | UGGUGACA G AUCACGGC | 3220 | GCCGUGAU GGAGGAAACUCC CU UCAAGGACAUCGUCCGGG UGUCACCA | 8070 |
| 1099 | CAGAUCAC G GCUCGUGC | 3221 | GCACGAGC GGAGGAAACUCC CU UCAAGGACAUCGUCCGGG GUGAUCUG | 8071 |
| 1100 | AGAUCACG G CUCGUGCG | 2268 | CGCACGAG GGAGGAAACUCC CU UCAAGGACAUCGUCCGGG CGUGAUCU | 8072 |
| 1104 | CACGGCUC G UGCGUCCG | 2269 | CGGACGCA GGAGGAAACUCC CU UCAAGGACAUCGUCCGGG GAGCCGUG | 8073 |
| 1106 | CGGCUCGU G CGUCCGAG | 2270 | CUCGGACG GGAGGAAACUCC CU UCAAGGACAUCGUCCGGG ACGAGCCG | 8074 |
| 1108 | GCUCGUGC G UCCGAGCC | 2271 | GGCUCGGA GGAGGAAACUCC CU UCAAGGACAUCGUCCGGG GCACGAGC | 8075 |
| 1112 | GUGCGUCC G AGCCUGUG | 3222 | CACAGGCU GGAGGAAACUCC CU UCAAGGACAUCGUCCGGG GGACGCAC | 8076 |
| 1114 | GCGUCCGA G CCUGUGGG | 2272 | CCCACAGG GGAGGAAACUCC CU UCAAGGACAUCGUCCGGG UCGGACGC | 8077 |
| 1118 | CCGAGCCU G UGGGGCCG | 2273 | CGGCCCCA GGAGGAAACUCC CU UCAAGGACAUCGUCCGGG AGGCUCGG | 8078 |
| 1120 | GAGCCUGU G GGGCCGAC | 3223 | GUCGGCCC GGAGGAAACUCC CU UCAAGGACAUCGUCCGGG ACAGGCUC | 8079 |
| 1121 | AGCCUGUG G GGCCGACA | 3224 | UGUCGGCC GGAGGAAACUCC CU UCAAGGACAUCGUCCGGG CACAGGCU | 8080 |
| 1122 | GCCUGUGG G GCCGACAG | 3225 | CUGUCGGC GGAGGAAACUCC CU UCAAGGACAUCGUCCGGG CCACAGGC | 8081 |
| 1123 | CCUGUGGG G CCGACAGC | 2274 | GCUGUCGG GGAGGAAACUCC CU UCAAGGACAUCGUCCGGG CCCACAGG | 8082 |
| 1126 | GUGGGGCC G ACAGCUAU | 3226 | AUAGCUGU GGAGGAAACUCC CU UCAAGGACAUCGUCCGGG GGCCCCAC | 8083 |
| 1130 | GGCCGACA G CUAUGAGA | 2275 | UCUCAUAG GGAGGAAACUCC CU UCAAGGACAUCGUCCGGG UGUCGGCC | 8084 |
| 1135 | ACAGCUAU G AGAUGGAG | 3227 | CUCCAUCU GGAGGAAACUCC CU UCAAGGACAUCGUCCGGG AUAGCUGU | 8085 |
| 1137 | AGCUAUGA G AUGGAGGA | 3228 | UCCUCCAU GGAGGAAACUCC CU UCAAGGACAUCGUCCGGG UCAUAGCU | 8086 |
| 1140 | UAUGAGAU G GAGGAAGA | 3229 | UCUUCCUC GGAGGAAACUCC CU UCAAGGACAUCGUCCGGG AUCUCAUA | 8087 |
| 1141 | AUGAGAUG G AGGAAGAC | 3230 | GUCUUCCU GGAGGAAACUCC CU UCAAGGACAUCGUCCGGG CAUCUCAU | 8088 |
| 1143 | GAGAUGGA G GAAGACGG | 3231 | CCGUCUUC GGAGGAAACUCC CU UCAAGGACAUCGUCCGGG UCCAUCUC | 8089 |
| 1144 | AGAUGGAG G AAGACGGC | 3232 | GCCGUCUU GGAGGAAACUCC CU UCAAGGACAUCGUCCGGG CUCCAUCU | 8090 |
| 1147 | UGGAGGAA G ACGGCGUC | 3233 | GACGCCGU GGAGGAAACUCC CU UCAAGGACAUCGUCCGGG UUCCUCCA | 8091 |
| 1150 | AGGAAGAC G GCGUCCGC | 3234 | GCGGACGC GGAGGAAACUCC CU UCAAGGACAUCGUCCGGG GUCUUCCU | 8092 |
| 1151 | GGAAGACG G CGUCCGCA | 2276 | UGCGGACG GGAGGAAACUCC CU UCAAGGACAUCGUCCGGG CGUCUUCC | 8093 |
| 1153 | AAGACGGC G UCCGCAAG | 2277 | CUUGCGGA GGAGGAAACUCC CU UCAAGGACAUCGUCCGGG GCCGUCUU | 8094 |
| 1157 | CGGCGUCC G CAAGUGUA | 2278 | UACACUUG GGAGGAAACUCC CU UCAAGGACAUCGUCCGGG GGACGCCG | 8095 |
| 1161 | GUCCGCAA G UGUAAGAA | 2279 | UUCUUACA GGAGGAAACUCC CU UCAAGGACAUCGUCCGGG UUGCGGAC | 8096 |
| 1163 | CCGCAAGU G UAAGAAGU | 2280 | ACUUCUUA GGAGGAAACUCC CU UCAAGGACAUCGUCCGGG ACUUGCGG | 8097 |
| 1167 | AAGUGUAA G AAGUGCGA | 3235 | UCGCACUU GGAGGAAACUCC CU UCAAGGACAUCGUCCGGG UUACACUU | 8098 |
| 1170 | UGUAAGAA G UGCGAAGG | 2281 | CCUUCGCA GGAGGAAACUCC CU UCAAGGACAUCGUCCGGG UUCUUACA | 8099 |
| 1172 | UAAGAAGU G CGAAGGGC | 2282 | GCCCUUCG GGAGGAAACUCC CU UCAAGGACAUCGUCCGGG AGUUCUUA | 8100 |
| 1174 | AGAAGUGC G AAGGGCCU | 3236 | AGGCCCUU GGAGGAAACUCC CU UCAAGGACAUCGUCCGGG GCACUUCU | 8101 |
| 1177 | AGUGCGAA G GGCCUUGC | 3237 | GCAAGGCC GGAGGAAACUCC CU UCAAGGACAUCGUCCGGG UUCGCACU | 8102 |
| 1178 | GUGCGAAG G GCCUUGCC | 3238 | GGCAAGGC GGAGGAAACUCC CU UCAAGGACAUCGUCCGGG CUUGGCAC | 8103 |
| 1179 | UGCGAAGG G CCUUGCCG | 2283 | CGGCAAGG GGAGGAAACUCC CU UCAAGGACAUCGUCCGGG CCUUCGCA | 8104 |
| 1184 | AGGGCCUU G CCGCAAAG | 2284 | CUUUGCGG GGAGGAAACUCC CU UCAAGGACAUCGUCCGGG AAGGCCCU | 8105 |
| 1187 | GCCUUGCC G CAAAGUGU | 2285 | ACACUUUG GGAGGAAACUCC CU UCAAGGACAUCGUCCGGG GGCAAGGC | 8106 |
| 1192 | GCCGCAAA G UGUGUAAC | 2286 | GUUACACA GGAGGAAACUCC CU UCAAGGACAUCGUCCGGG UUUGCGGC | 8107 |
| 1194 | CGCAAAGU G UGUAACGG | 2287 | CCGUUACA GGAGGAAACUCC CU UCAAGGACAUCGUCCGGG ACUUUGCG | 8108 |
| 1196 | CAAAGUGU G UAACGGAA | 2288 | UUCCGUUA GGAGGAAACUCC CU UCAAGGACAUCGUCCGGG ACAUUUUG | 8109 |
| 1201 | UGUGUAAC G GAAUAGGU | 3239 | ACCUAUUC GGAGGAAACUCC CU UCAAGGACAUCGUCCGGG GUUACACA | 8110 |
| 1202 | GUGUAACG G AAUAGGUA | 3240 | UACCUAUU GGAGGAAACUCC CU UCAAGGACAUCGUCCGGG CGUUACAC | 8111 |
| 1207 | ACGGAAUA G GUAUUGGU | 3241 | ACCAAUAC GGAGGAAACUCC CU UCAAGGACAUCGUCCGGG UAUUCCGU | 8112 |
| 1208 | CGGAAUAG G UAUUGGUG | 2289 | CACCAAUA GGAGGAAACUCC CU UCAAGGACAUCGUCCGGG CUAUUCCG | 8113 |
| 1213 | UAGGUAUU G GUGAAUUU | 3242 | AAAUUCAC GGAGGAAACUCC CU UCAAGGACAUCGUCCGGG AAUACCUA | 8114 |
| 1214 | AGGUAUUG G UGAAUUUA | 2290 | UAAAUUCA GGAGGAAACUCC CU UCAAGGACAUCGUCCGGG CAAUACCU | 8115 |
| 1216 | GUAUUGGU G AAUUUAAA | 3243 | UUUAAAUU GGAGGAAACUCC CU UCAAGGACAUCGUCCGGG ACCAAUAC | 8116 |
| 1225 | AAUUUAAA G ACUCACUC | 3244 | GAGUGAGU GGAGGAAACUCC CU UCAAGGACAUCGUCCGGG UUUAAAUU | 8117 |
| 1243 | CAUAAAAU U CUACGAAU | 2291 | AUUCGUAG GGAGGAAACUCC CU UCAAGGACAUCGUCCGGG AUUUAUGG | 8118 |
| 1248 | AAUGCUAC G AAUAUUAA | 3245 | UUAAUAUU GGAGGAAACUCC CU UCAAGGACAUCGUCCGGG GUAGCAUU | 8119 |
| 1271 | CAAAAACU G CACCUCCA | 2292 | UGGAGGUG GGAGGAAACUCC CU UCAAGGACAUCGUCCGGG AGUUUUUG | 8120 |
| 1283 | CUCCAUCA G UGGCGAUC | 2293 | GAUCGCCA GGAGGAAACUCC CU UCAAGGACAUCGUCCGGG UGAUGGAG | 8121 |
| 1285 | CCAUCAGU G GCGAUCUC | 3246 | GAGAUCGC GGAGGAAACUCC CU UCAAGGACAUCGUCCGGG ACUGAUGG | 8122 |
| 1286 | CAUCAGUG G CGAUCUCC | 2294 | GGAGAUCG GGAGGAAACUCC CU UCAAGGACAUCGUCCGGG CACUGAUG | 8123 |
| 1288 | UCAGUGGC G AUCUCCAC | 3247 | GUGGAGAU GGAGGAAACUCC CU UCAAGGACAUCGUCCGGG GCCACUGA | 8124 |
| 1302 | CACAUCCU G CCGGUGGC | 2295 | GCCACCGG GGAGGAAACUCC CU UCAAGGACAUCGUCCGGG AGGAUGUG | 8125 |
| 1305 | AUCCUGCC G GUGGCAUU | 3248 | AAUGCCAC GGAGGAAACUCC CU UCAAGGACAUCGUCCGGG GGCAGGAU | 8126 |
| 1306 | UCCUGCCG G UGGCAUUU | 2296 | AAAUGCCA GGAGGAAACUCC CU UCAAGGACAUCGUCCGGG CGGCAGGA | 8127 |
| 1308 | CUGCCGGU G GCAUUUAG | 3249 | CUAAAUGC GGAGGAAACUCC CU UCAAGGACAUCGUCCGGG ACCGGCAG | 8128 |
| 1309 | UGCCGGUG G CAUUUAGG | 2297 | CCUAAAUG GGAGGAAACUCC CU UCAAGGACAUCGUCCGGG CACCGGCA | 8129 |
| 1316 | GGCAUUUA G GGGUGACU | 3250 | AGUCACCC GGAGGAAACUCC CU UCAAGGACAUCGUCCGGG UAAAUGCC | 8130 |
| 1317 | GCAUUUAG G GGUGACUC | 3251 | GAGUCACC GGAGGAAACUCC CU UCAAGGACAUCGUCCGGG CUAAAUGC | 8131 |
| 1318 | CAUUUAGG G GUGACUCC | 3252 | GGAGUCAC GGAGGAAACUCC CU UCAAGGACAUCGUCCGGG CCUAAAUG | 8132 |
| 1319 | AUUUAGGG G UGACUCCU | 2298 | AGGAGUCA GGAGGAAACUCC CU UCAAGGACAUCGUCCGGG CCCUAAAU | 8133 |
| 1321 | UUAGGGGU G ACUCCUUC | 3253 | GAAGGAGU GGAGGAAACUCC CU UCAAGGACAUCGUCCGGG ACCCCUAA | 8134 |
| 1347 | CCUCCUCU G GAUCCACA | 3254 | UGUGGAUC GGAGGAAACUCC CU UCAAGGACAUCGUCCGGG AGAGGAGG | 8135 |
| 1348 | CUCCUCUG G AUCCACAG | 3255 | CUGUGGAU GGAGGAAACUCC CU UCAAGGACAUCGUCCGGG CAGAGGAG | 8136 |
| 1356 | GAUCCACA G GAACUGGA | 3256 | UCCAGUUC GGAGGAAACUCC CU UCAAGGACAUCGUCCGGG UGUGGAUC | 8137 |
| 1357 | AUCCACAG G AACUGGAU | 3257 | AUCCAGUU GGAGGAAACUCC CU UCAAGGACAUCGUCCGGG CUGUGGAU | 8138 |
| 1362 | CAGGAACU G GAUAUUCU | 3258 | AGAAUAUC GGAGGAAACUCC CU UCAAGGACAUCGUCCGGG AGUUCCUG | 8139 |
| 1363 | AGGAACUG G AUAUUCUG | 3259 | CAGAAUAU GGAGGAAACUCC CU UCAAGGACAUCGUCCGGG CAGUUCCU | 8140 |
| 1371 | GAUAUUCU G AAAACCGU | 3260 | ACGGUUUU GGAGGAAACUCC CU UCAAGGACAUCGUCCGGG AGAAUAUC | 8141 |
| 1378 | UGAAAACC G UAAAGGAA | 2299 | UUCCUUUA GGAGGAAACUCC CU UCAAGGACAUCGUCCGGG GGUUUUCA | 8142 |
| 1383 | ACCGUAAA G GAAAUCAC | 3261 | GUGAUUUC GGAGGAAACUCC CU UCAAGGACAUCGUCCGGG UUUACGGU | 8143 |
| 1384 | CCGUAAAG G AAAUCACA | 3262 | UGUGAUUU GGAGGAAACUCC CU UCAAGGACAUCGUCCGGG CUUUACGG | 8144 |
| 1393 | AAAUCACA G GGUUUUUG | 3263 | CAAAAACC GGAGGAAACUCC CU UCAAGGACAUCGUCCGGG UGUGAUUU | 8145 |
| 1394 | AAUCACAG G GUUUUUGC | 3264 | GCAAAAAC GGAGGAAACUCC CU UCAAGGACAUCGUCCGGG CUGUGAUU | 8146 |
| 1395 | AUCACAGG G UUUUUGCU | 2300 | AGCAAAAA GGAGGAAACUCC CU UCAAGGACAUCGUCCGGG CCUGUGAU | 8157 |
| 1401 | GGGUUUUU G CUGAUUCA | 2301 | UGAAUCAG GGAGGAAACUCC CU UCAAGGACAUCGUCCGGG AAAAACCC | 8148 |
| 1404 | UUUUUGCU G AUUCAGGC | 3265 | GCCUGAAU GGAGGAAACUCC CU UCAAGGACAUCGUCCGGG AGCAAAAA | 8149 |
| 1410 | CUGAUUCA G GCUUGGCC | 3266 | GGCCAAGC GGAGGAAACUCC CU UCAAGGACAUCGUCCGGG UGAAUCAG | 8150 |
| 1411 | UGAUUCAG G CUUGGCCU | 2302 | AGGCCAAG GGAGGAAACUCC CU UCAAGGACAUCGUCCGGG CUGAAUCA | 8151 |
| 1415 | UCAGGCUU G GCCUGAAA | 3267 | UUUCAGGC GGAGGAAACUCC CU UCAAGGACAUCGUCCGGG AAGCCUGA | 8152 |
| 1416 | CAGGCUUG G CCUGAAAA | 2303 | UUUUCAGG GGAGGAAACUCC CU UCAAGGACAUCGUCCGGG CAAGCCUG | 8153 |
| 1420 | CUUGGCCU G AAAACAGG | 3268 | CCUGUUUU GGAGGAAACUCC CU UCAAGGACAUCGUCCGGG AGGCCAAG | 8154 |
| 1427 | UGAAAACA G GACGGACC | 3269 | GGUCCGUC GGAGGAAACUCC CU UCAAGGACAUCGUCCGGG UGUUUUCA | 8155 |
| 1428 | GAAAACAG G ACGGACCU | 3270 | AGGUCCGU GGAGGAAACUCC CU UCAAGGACAUCGUCCGGG CUGUUUUC | 8156 |
| 1431 | AACAGGAC G GACCUCCA | 3271 | UGGAGGUC GGAGGAAACUCC CU UCAAGGACAUCGUCCGGG GUCCUGUU | 8157 |
| 1432 | ACAGGACG G ACCUCCAU | 3272 | AUGGAGGU GGAGGAAACUCC CU UCAAGGACAUCGUCCGGG CGUCCUGU | 8158 |
| 1441 | ACCUCCAU G CCUUUGAG | 2304 | CUCAAAGG GGAGGAAACUCC CU UCAAGGACAUCGUCCGGG AUGGAGGU | 8159 |
| 1447 | AUGCCUUU G AGAACCUA | 3273 | UAGGUUCU GGAGGAAACUCC CU UCAAGGACAUCGUCCGGG AAAGGCAU | 8160 |
| 1449 | GCCUUUGA G AACCUAGA | 3274 | UCUAGGUU GGAGGAAACUCC CU UCAAGGACAUCGUCCGGG UCAAAGGC | 8161 |
| 1456 | AGAACCUA G AAAUCAUA | 3275 | UAUGAUUU GGAGGAAACUCC CU UCAAGGACAUCGUCCGGG UAGGUUCU | 8162 |
| 1466 | AAUCAUAC G CGGCAGGA | 2305 | UCCUGCCG GGAGGAAACUCC CU UCAAGGACAUCGUCCGGG GUAUGAUU | 8163 |
| 1468 | UCAUACGC G GCAGGACC | 3276 | GGUCCUGC GGAGGAAACUCC CU UCAAGGACAUCGUCCGGG GCGUAUGA | 8164 |
| 1469 | CAUACGCG G CAGGACCA | 2306 | UGGUCCUG GGAGGAAACUCC CU UCAAGGACAUCGUCCGGG CGCGUAUG | 8165 |
| 1472 | ACGCGGCA G GACCAAGC | 3277 | GCUUGGUC GGAGGAAACUCC CU UCAAGGACAUCGUCCGGG UGCCGCGU | 8166 |
| 1473 | GCGGGCAG G ACCAAGCA | 3278 | UGCUUGGU GGAGGAAACUCC CU UCAAGGACAUCGUCCGGG CUGCCGCG | 8167 |
| 1479 | AGGACCAA G CAACAUGG | 2307 | CCAUGUUG GGAGGAAACUCC CU UCAAGGACAUCGUCCGGG UUGGUCCU | 8168 |
| 1486 | AGCAACAU G GUCAGUUU | 3279 | AAACUGAC GGAGGAAACUCC CU UCAAGGACAUCGUCCGGG AUGUUGCU | 8169 |
| 1487 | GCAACAUG G UCAGUUUU | 2308 | AAAACUGA GGAGGAAACUCC CU UCAAGGACAUCGUCCGGG CAUGUUGC | 8170 |
| 1491 | CAUGGUCA G UUUUCUCU | 2309 | AGAGAAAA GGAGGAAACUCC CU UCAAGGACAUCGUCCGGG UGACCAUG | 8171 |
| 1501 | UUUCUCUU G CAGUCGUC | 2310 | GACGACUG GGAGGAAACUCC CU UCAAGGACAUCGUCCGGG AAGAGAAA | 8172 |
| 1504 | CUCUUGCA G UCGUCAGC | 2311 | GCUGACGA GGAGGAAACUCC CU UCAAGGACAUCGUCCGGG UGCAAGAG | 8173 |
| 1507 | UUGCAGUC G UCAGCCUG | 2312 | CAGGCUGA GGAGGAAACUCC CU UCAAGGACAUCGUCCGGG GACUGCAA | 8174 |
| 1511 | AGUCGUCA G CCUGAACA | 2313 | UGUUCAGG GGAGGAAACUCC CU UCAAGGACAUCGUCCGGG UGACGACU | 8175 |
| 1515 | GUCAGCCU G AACAUAAC | 3280 | GUUAUGUU GGAGGAAACUCC CU UCAAGGACAUCGUCCGGG AGGCUGAC | 8176 |
| 1530 | ACAUCCUU G GGAUUACG | 3281 | CGUAAUCC GGAGGAAACUCC CU UCAAGGACAUCGUCCGGG AAGGAUGU | 8177 |
| 1531 | CAUCCUUG G GAUUACGC | 3282 | GCGUAAUC GGAGGAAACUCC CU UCAAGGACAUCGUCCGGG CAAGGAUG | 8178 |
| 1532 | AUCCUUGG G AUUACGCU | 3283 | AGCGUAAU GGAGGAAACUCC CU UCAAGGACAUCGUCCGGG CCAAGGAU | 8179 |
| 1538 | GGGAUUAC G CUCCCUCA | 2314 | UGAGGGAG GGAGGAAACUCC CU UCAAGGACAUCGUCCGGG GUAAUCCC | 8180 |
| 1548 | UCCCUCAA G GAGAUAAG | 3284 | CUUAUCUC GGAGGAAACUCC CU UCAAGGACAUCGUCCGGG UUGAGGGA | 8181 |
| 1549 | CCCUCAAG G AGAUAAGU | 3285 | ACUUAUCU GGAGGAAACUCC CU UCAAGGACAUCGUCCGCG CUUCAGGG | 8182 |
| 1551 | CUCAAGGA G AUAAGUGA | 3286 | UCACUUAU GGAGGAAACUCC CU UCAAGGACAUCGUCCGGG UCCUUGAG | 8183 |
| 1556 | GGAGAUAA G UGAUGGAG | 2315 | CUCCAUCA GGAGGAAACUCC CU UCAAGGACAUCGUCCGGG UUAUCUCC | 8184 |
| 1558 | AGAUAAGU G AUGGAGAU | 3287 | AUCUCCAU GGAGGAAACUCC CU UCAAGGACAUCGUCCGGG ACUUAUCU | 8185 |
| 1561 | UAAGUGAU G GAGAUGUG | 3288 | CACAUCUC GGAGGAAACUCC CU UCAAGGACAUCGUCCGGG AUCACUUA | 8186 |
| 1562 | AAGUGAUG G AGAUGUGA | 3289 | UCACAUCU GGAGGAAACUCC CU UCAAGGACAUCGUCCGGG CAUCACUU | 8187 |
| 1564 | GUGAUGGA G AUGUGAUA | 3290 | UAUCACAU GGAGGAAACUCC CU UCAAGGACAUCGUCCGGG UCCAUCAC | 8188 |
| 1567 | AUGGAGAU G UGAUAAUU | 2316 | AAUUAUCA GGAGGAAACUCC CU UCAAGGACAUCGUCCGGG AUCUCCAU | 8189 |
| 1569 | GGAGAUGU G AUAAUUUC | 3291 | GAAAUUAU GGAGGAAACUCC CU UCAAGGACAUCGUCCGGG ACAUCUCC | 8190 |
| 1579 | UAAUUUCA G GAAACAAA | 3292 | UUUGUUUC GGAGGAAACUCC CU UCAAGGACAUCGUCCGGG UGAAAUUA | 8191 |
| 1580 | AAUUUCAG G AAACAAAA | 3293 | UUUUGUUU GGAGGAAACUCC CU UCAAGGACAUCGUCCGGG CUGAAAUU | 8192 |
| 1593 | AAAAAUUU G UGCUAUGC | 2317 | GCAUAGCA GGAGGAAACUCC CU UCAAGGACAUCGUCCGGG AAAUUUUU | 8193 |
| 1595 | AAAUUUGU G CUAUGCAA | 2318 | UUGCAUAG GGAGGAAACUCC CU UCAAGGACAUCGUCCGGG ACAAAUUU | 8194 |
| 1600 | UGUGCUAU G CAAAUACA | 2319 | UGUAUUUG GGAGGAAACUCC CU UCAAGGACAUCGUCCGGG AUAGCACA | 8195 |
| 1616 | AAUAAACU G GAAAAAAC | 3294 | GUUUUUUC GGAGGAAACUCC CU UCAAGGACAUCGUCCGGG AGUUUAUU | 8196 |
| 1617 | AUAAACUG G AAAAAACU | 3295 | AGUUUUUU GGAGGAAACUCC CU UCAAGGACAUCGUCCGGG CAGUUUAU | 8197 |
| 1626 | AAAAAACU G UUUGGGAC | 2320 | GUCCCAAA GGAGGAAACUCC CU UCAAGGACAUCGUCCGGG AGUUUUUU | 8198 |
| 1630 | AACUGUUU G GGACCUCC | 3296 | GGAGGUCC GGAGGAAACUCC CU UCAAGGACAUCGUCCGGG AAACAGUU | 8199 |
| 1631 | ACUGUUUG G GACCUCCG | 3297 | CGGAGGUC GGAGGAAACUCC CU UCAAGGACAUCGUCCGGG CAAACAGU | 8200 |
| 1632 | CUGUUUGG G ACCUCCGG | 3298 | CCGGAGGU GGAGGAAACUCC CU UCAAGGACAUCGUCCGGG CCAAACAG | 8201 |
| 1639 | GGACCUCC G GUCAGAAA | 3299 | UUUCUGAC GGAGGAAACUCC CU UCAAGGACAUCGUCCGGG GGAGGUCC | 8202 |
| 1640 | GACCUCCG G UCAGAAAA | 2321 | UUUUCUGA GGAGGAAACUCC CU UCAAGGACAUCGUCCGGG CGGAGGUC | 8203 |
| 1644 | UCCGGUCA G AAAACCAA | 3300 | UUGGUUUU GGAGGAAACUCC CU UCAAGGACAUCGUCCGGG UGACCGGA | 8204 |
| 1661 | AAUUAUAA G CAACAGAG | 2322 | CUCUGUUG GGAGGAAACUCC CU UCAAGGACAUCGUCCGGG UUAUAAUU | 8205 |
| 1667 | AAGCAACA G AGGUGAAA | 3301 | UUUCACCU GGAGGAAACUCC CU UCAAGGACAUCGUCCGGG UGUUGCUU | 8206 |
| 1669 | GCAACAGA G GUGAAAAC | 3302 | GUUUUCAC GGAGGAAACUCC CU UCAAGGACAUCGUCCGGG UCUGUUGC | 8207 |
| 1670 | CAACAGAG G UGAAAACA | 2323 | UGUUUUCA GGAGGAAACUCC CU UCAAGGACAUCGUCCGGG CUCUGUUG | 8208 |
| 1672 | ACAGAGGU G AAAACAGC | 3303 | GCUGUUUU GGAGGAAACUCC CU UCAAGGACAUCGUCCGGG ACCUCUGU | 8209 |
| 1679 | UGAAAACA G CUGCAAGG | 2324 | CCUUGCAG GGAGGAAACUCC CU UCAAGGACAUCGUCCGGG UGUUUUCA | 8210 |
| 1682 | AAACAGCU G CAAGGCCA | 2325 | UGGCCUUG GGAGGAAACUCC CU UCAAGGACAUCGUCCGGG AGCUGUUU | 8211 |
| 1686 | AGCUGCAA G GCCACAGG | 3304 | CCUGUGGC GGAGGAAACUCC CU UCAAGGACAUCGUCCGGG UUGCAGCU | 8212 |
| 1687 | GCUGCAAG G CCACAGGC | 2326 | GCCUGUGG GGAGGAAACUCC CU UCAAGGACAUCGUCCGGG CUUGCAGC | 8213 |
| 1693 | AGGCCACA G GCCAGGUC | 3305 | GACCUGGC GGAGGAAACUCC CU UCAAGGACAUCGUCCGGG UGUGGCCU | 8214 |
| 1694 | GGCCACAG G CCAGGUCU | 2327 | AGACCUGG GGAGGAAACUCC CU UCAAGGACAUCGUCCGGG CUGUGGCC | 8215 |
| 1698 | ACAGGCCA G GUCUGCCA | 3306 | UGGCAGAC GGAGGAAACUCC CU UCAAGGACAUCGUCCGGG UGGCCUGU | 8216 |
| 1699 | CAGGCCAG G UCUGCCAU | 2328 | AUGGCAGA GGAGGAAACUCC CU UCAAGGACAUCGUCCGGG CUGGCCUG | 8217 |
| 1703 | CCAGGUCU G CCAUGCCU | 2329 | AGGCAUGG GGAGGAAACUCC CU UCAAGGACAUCGUCCGGG AGACCUGG | 8218 |
| 1708 | UCUGCCAU G CCUUGUGC | 2330 | GCACAAGG GGAGGAAACUCC CU UCAAGGACAUCGUCCGGG AUGGCAGA | 8219 |
| 1713 | CAUGCCUU G UGCUCCCC | 2331 | GGGGAGCA GGAGGAAACUCC CU UCAAGGACAUCGUCCGGG AAGGCAUG | 8220 |
| 1715 | UGCCUUGU G CUCCCCCG | 2332 | CGGGGGAG GGAGGAAACUCC CU UCAAGGACAUCGUCCGGG ACAAGGCA | 8221 |
| 1723 | GCUCCCCC G AGGGCUGC | 3307 | GCAGCCCU GGAGGAAACUCC CU UCAAGGACAUCGUCCGGG GGGGGAGC | 8222 |
| 1725 | UCCCCCGA G GGCUGCUG | 3308 | CAGCAGCC GGAGGAAACUCC CU UCAAGGACAUCGUCCGGG UCGGGGGA | 8223 |
| 1726 | CCCCCGAG G GCUGCUGG | 3309 | CCAGCAGC GGAGGAAACUCC CU UCAAGGACAUCUUCCGGG CUCGGGGG | 8224 |
| 1727 | CCCCGAGG G GUUCUGUG | 2333 | CCCAGCAG GGAGGAAACUCC CU UCAAGGACAUCGUCCGGG CCUCGGGG | 8225 |
| 1730 | CGAGGGCU G CUGGGUCC | 2334 | GGCCCCAG GGAGGAAACUCC CU UCAAGGACAUCGUCCGGG AGCCCUCG | 8226 |
| 1733 | GGGCUGCU G GGGCCCGG | 3310 | CCGGGCCC GGAGGAAACUCC CU UCAAGGACAUCGUCCGGG AGCAGCCC | 8227 |
| 1734 | GGCUGCUG G GGCCCGGA | 3311 | UCCGGGCC GGAGGAAACUCC CU UCAAGGACAUCGUCCGUG CAGCAGCC | 8228 |
| 1735 | GCUGCUGG G GCCCGGAG | 3312 | CUCCGGGC GGAGGAAACUCC CU UCAAGGACAUCGUCCGUG CCAGCAGC | 8229 |
| 1736 | CUGCUUGG G CCCGGAGC | 2335 | GCUCCGGG GGAGGAAACUCC CU UCAAGGACAUCGUCCGGG CCCAGCAG | 8230 |
| 1740 | UGGGGCCC G GAGCCCAG | 3313 | CUGGGCUC GGAGGAAACUCC CU UCAAGGACAUCGUCCGGG GGGCCCCA | 8231 |
| 1741 | GGGGCCCG G AGCCCAGG | 3314 | CCUGGGCU GGAGGAAACUCC CU UCAAGGACAUCGUCCGGG CGGGCCCC | 8232 |
| 1743 | GGCCCGGA G CCCAGGGA | 2336 | UCCCUGGG GGAGGAAACUCC CU UCAAGGACAUCGUCCGGG UCCGGGCC | 8233 |
| 1748 | GGAGCCCA G GGACUGCG | 3315 | CGCAGUCC GGAGGAAACUCC CU UCAAGGACAUCGUCCGGG UGGGCUCC | 8234 |
| 1749 | GAUCCCAG G GACUGCGU | 3316 | ACGCAGUC GGAGGAAACUCC CU UCAAGGACAUCGUCCGGG CUGGGCUC | 8235 |
| 1750 | AGCCCAGG G ACUGCGUC | 3317 | GACGCAGU GGAGGAAACUCC CU UCAAGGACAUCGUCCGGG CCUGGGCU | 8236 |
| 1754 | CAGGGACU G CGUCUCUU | 2337 | AAGAGACG GGAGGAAACUCC CU UCAAGGACAUCGUCCGGG AGUCCCUG | 8237 |
| 1756 | GGGACUGC G UCUCUUGC | 2338 | GCAAGAGA GGAGGAAACUCC CU UCAAGGACAUCGUCCGGG GCAGUCCC | 8238 |
| 1763 | CGUCUCUU G CCGGAAUG | 2339 | CAUUCCGG GGAGGAAACUCC CU UCAAGGACAUCGUCCGGG AAGAGACG | 8239 |
| 1766 | CUCUUGCC G GAAUGUCA | 3318 | UGACAUUC GGAGGAAACUCC CU UCAAGGACAUCGUCCGGG GGCAAGAG | 8240 |
| 1767 | UCUUGCCG G AAUGUCAG | 3319 | CUGACAUU GGAGGAAACUCC CU UCAAGGACAUCGUCCGGG CGGCAAGA | 8241 |
| 1771 | GCCGGAAU G UCAGCCGA | 2340 | UCGGCUGA GGAGGAAACUCC CU UCAAGGACAUCGUCCGGG AUUCCGGC | 8242 |
| 1775 | GAAUGUCA G CCGAGGCA | 2341 | UGCCUCGG GGAGGAAACUCC CU UCAAGGACAUCGUCCGGG UGACAUUC | 8243 |
| 1778 | UGUCAGCC G AGGCAGGG | 3320 | CCCUGCCU GGAGGAAACUCC CU UCAAGGACAUCCUCCGGG GGCUGACA | 8244 |
| 1780 | UCAGCCGA G GCAGGGAA | 3321 | UUCCCUGC GGAGGAAACUCC CU UCAAGGACAUCCUCCGGG UCGGCUGA | 8245 |
| 1781 | CAGCCGAG G CAGGGAAU | 2342 | AUUCCCUG GGAGGAAACUCC CU UCAAGGACAUCCUCCGGG CUCGGCUG | 8246 |
| 1784 | CCGAGGCA G GGAAUGCG | 3322 | CGCAUUCC GGAGGAAACUCC CU UCAAGGACAUCCUCCGGG UGCCUCGG | 8247 |
| 1785 | CGAGGCAG G GAAUGCGU | 3323 | ACGCAUUC GGAGGAAACUCC CU UCAAGGACAUCCUCCGGG CUGCCUCG | 8248 |
| 1786 | GAGGCAGG G AAUGCGUG | 3324 | CACGCAUU GGAGGAAACUCC CU UCAAGGACAUCCUCCGGG CCUGCCUC | 8249 |
| 1790 | GAGGGAAU G CGUGGACA | 2343 | UGUCCACG GGAGGAAACUCC CU UCAAGGACAUCCUCCGGG AUUCCCUG | 8250 |
| 1792 | GGGAAUGC G UGGACAAG | 2344 | CUUGUCCA GGAGGAAACUCC CU UCAAGGACAUCCUCCGGG GCAUUCCC | 8251 |
| 1794 | GAAUGCGU G GACAAGUG | 3325 | CACUUGUC GGAGGAAACUCC CU UCAAGGACAUCCUCCGGG ACGCAUUC | 8252 |
| 1795 | AAUGCGUG G ACAAGUGC | 3326 | GCACUUGU GGAGGAAACUCC CU UCAAGGACAUCCUCCGGG CACGCAUU | 8253 |
| 1800 | GUGGACAA G UGCAAGCU | 2345 | AGCUUGCA GGAGGAAACUCC CU UCAAGGACAUCCUCCGGG UUGUCCAC | 8254 |
| 1802 | GGACAAGU G CAAGCUUC | 2346 | GAAGCUUG GGAGGAAACUCC CU UCAAGGACAUCCUCCGGG ACUUGUCC | 8255 |
| 1806 | AAGUGCAA G CUUCUGGA | 2347 | UCCAGAAG GGAGGAAACUCC CU UCAAGGACAUCCUCCGGG UUGCACUU | 8256 |
| 1812 | AAGCUUCU G GAGGGUGA | 3327 | UCACCCUC GGAGGAAACUCC CU UCAAGGACAUCCUCCGGG AGAAGCUU | 8257 |
| 1813 | AGCUUCUG G AGGGUGAG | 3328 | CUCACCCU GGAGGAAACUCC CU UCAAGGACAUCCUCCGGG CAGAAGCU | 8258 |
| 1815 | CUUCUGGA G GGUGAGCC | 3329 | GGCUCACC GGAGGAAACUCC CU UCAAGGACAUCCUCCGGG UCCAGAAG | 8259 |
| 1816 | UUCUGGAG G GUGAGCCA | 3330 | UGGCUCAC GGAGGAAACUCC CU UCAAGGACAUCCUCCGGG CUCCAGAA | 8260 |
| 1817 | UCUGGAGG G UGAGCCAA | 2348 | UUGGCUCA GGAGGAAACUCC CU UCAAGGACAUCCUCCGGG CCUCCAGA | 8261 |
| 1819 | UGGAGGGU G AGCCAAGG | 3331 | CCUUGGCU GGAGGAAACUCC CU UCAAGGACAUCCUCCGGG ACCCUCCA | 8262 |
| 1821 | GAGGGUGA G CCAAGGGA | 2349 | UCCCUUGG GGAGGAAACUCC CU UCAAGGACAUCCUCCGGG UCACCCUC | 8263 |
| 1826 | UGAGCCAA G GGAGUUUG | 3332 | CAAACUCC GGAGGAAACUCC CU UCAAGGACAUCCUCCGGG UUGGCUCA | 8264 |
| 1827 | GAGCCAAG G GAGUUUGU | 3333 | ACAAACUC GGAGGAAACUCC CU UCAAGGACAUCCUCCGGG CUUGGCUC | 8265 |
| 1828 | AGCCAAGG G AGUUUGUG | 3334 | CACAAACU GGAGGAAACUCC CU UCAAGGACAUCGUCCGGG CCUUGGCU | 8266 |
| 1830 | CCAAGGGA G UUUGUGGA | 2350 | UCCACAAA GGAGGAAACUCC CU UCAAGGACAUCGUCCGGG UCCCUUGG | 8267 |
| 1834 | GGGAGUUU G UGGAGAAC | 2351 | GUUCUCCA GGAGGAAACUCC CU UCAAGGACAUCGUCCGGG AAACUCCC | 8268 |
| 1836 | GAGUUUGU G GAGAACUC | 3335 | GAGUUCUC GGAGGAAACUCC CU UCAAGGACAUCGUCCGGG ACAAACUC | 8269 |
| 1837 | AGUUUGUG G AGAACUCU | 3336 | AGAGUUCU GGAGGAAACUCC CU UCAAGGACAUCGUCCGGG CACAAACU | 8270 |
| 1839 | UUUGUGGA G AACUCUGA | 3337 | UCAGAGUU GGAGGAAACUCC CU UCAAGGACAUCGUCCGGG UCCACAAA | 8271 |
| 1846 | AGAACUCU G AGUGCAUA | 3338 | UAUGCACU GGAGGAAACUCC CU UCAAGGACAUCGUCCGGG AGAGUUCU | 8272 |
| 1848 | AACUCUGA G UGCAUACA | 2352 | UGUAUGCA GGAGGAAACUCC CU UCAAGGACAUGGUCCGGG UCAGAGUU | 8273 |
| 1850 | CUCUGAGU G CAUACAGU | 2353 | ACUGUAUG GGAGGAAACUCC CU UCAAGGACAUCGUCCGGG ACUCAGAG | 8274 |
| 1857 | UGCAUACA G UGCCACCC | 2354 | GGGUGGCA GGAGGAAACUCC CU UCAAGGACAUCGUCCGGG UGUAUGCA | 8275 |
| 1859 | CAUACAGU G CCACCCAG | 2355 | CUGGGUGG GGAGGAAACUCC CU UCAAGGACAUCGUCCGGG ACUGUAUG | 8276 |
| 1867 | GCCACCCA G AGUGCCUG | 3339 | CAGGCACU GGAGGAAACUCC CU UCAAGGACAUCGUCCGGG UGGGUGGC | 8277 |
| 1869 | CACCCAGA G UGCCUGCC | 2356 | GGCAGGCA GGAGGAAACUCC CU UCAAGGACAUCGUCCGGG UCUGGGUG | 8278 |
| 1871 | CCCAGAGU G CCUGCCUC | 2357 | GAGGCAGG GGAGGAAACUCC CU UCAAGGACAUCGUCCGGG ACUCUGGG | 8279 |
| 1875 | GAGUGCCU G CCUCAGGC | 2358 | GCCUGAGG GGAGGAAACUCC CU UCAAGGACAUCGUCCGGG AGGCACUC | 8280 |
| 1881 | CUGCCUCA G GCCAUGAA | 3340 | UUCAUGGC GGAGGAAACUCC CU UCAAGGACAUCGUCCGGG UGAGGCAG | 8281 |
| 1882 | UGCCUCAG G CCAUGAAC | 2359 | GUUCAUGG GGAGGAAACUCC CU UCAAGGACAUCGUCCGGG CUGAGGCA | 8282 |
| 1887 | CAGGCCAU G AACAUCAC | 3341 | GUGAUGUU GGAGGAAACUCC CU UCAAGGACAUCGUCCGGG AUGGCCUG | 8283 |
| 1898 | CAUCACCU G CACAGGAC | 2360 | GUCCUGUG GGAGGAAACUCC CU UCAAGGACAUCGUCCGGG AGGUGAUG | 8284 |
| 1903 | CCUGCACA G GACGGGGA | 3342 | UCCCCGUC GGAGGAAACUCC CU UCAAGGACAUCGUCCGGG UGUGCAGG | 8285 |
| 1904 | CUGCACAG G ACGGGGAC | 3343 | GUCCCCGU GGAGGAAACUCC CU UCAAGGACAUCGUCCGGG CUGUGCAG | 8286 |
| 1907 | CACAGGAC G GGGACCAG | 3344 | CUGGUCCC GGAGGAAACUCC CU UCAAGGACAUCGUCCGGG GUCCUGUG | 8287 |
| 1908 | ACAGGACG G GGACCAGA | 3345 | UCUGGUCC GGAGGAAACUCC CU UCAAGGACAUCGUCCGGG CGUCCUGU | 8288 |
| 1909 | CAGGACGG G GACCAGAC | 3346 | GUCUGGUC GGAGGAAACUCC CU UCAAGGACAUCGUCCGGG CCGUCCUG | 8289 |
| 1910 | AGGACGGG G ACCAGACA | 3347 | UGUCUGGU GGAGGAAACUCC CU UCAAGGACAUCGUCCGGG CCCGUCCU | 8290 |
| 1915 | GGGGACCA G ACAACUGU | 3348 | ACAGUUGU GGAGGAAACUCC CU UCAAGGACAUCGUCCGGG UGGUCCCC | 8291 |
| 1922 | AGACAACU G UAUCCAGU | 2361 | ACUGGAUA GGAGGAAACUCC CU UCAAGGACAUCGUCCGGG AGUUGUCU | 8292 |
| 1929 | UGUAUCCA G UGUGCCCA | 2362 | UGGGCACA GGAGGAAACUCC CU UCAAGGACAUCGUCCGGG UGGAUACA | 8293 |
| 1931 | UAUCCAGU G UGCCCACU | 2363 | AGUGGGCA GGAGGAAACUCC CU UCAAGGACAUCGUCCGGG ACUGGAUA | 8294 |
| 1933 | UCCAGUGU G CCCACUAC | 2364 | GUAGUGGG GGAGGAAACUCC CU UCAAGGACAUCGUCCGGG ACACUGGA | 8295 |
| 1945 | ACUACAUU G ACGGCCCC | 3349 | GGGGCCGU GGAGGAAACUCC CU UCAAGGACAUCGUCCGGG AAUGUAGU | 8296 |
| 1948 | ACAUUGAC G GCCCCCAC | 3350 | GUGGGGGC GGAGGAAACUCC CU UCAAGGACAUCGUCCGGG GUCAAUGU | 8297 |
| 1949 | CAUUGACG G CCCCCACU | 2365 | AGUGGGGG GGAGGAAACUCC CU UCAAGGACAUCGUCCGGG CGUCAAUG | 8298 |
| 1958 | CCCCCACU G CGUCAAGA | 2366 | UCUUGACG GGAGGAAACUCC CU UCAAGGACAUCGUCCGGG AGUGGGGG | 8299 |
| 1960 | CCCACUGC G UCAAGACC | 2367 | GGUCUUGA GGAGGAAACUCC CU UCAAGGACAUCGUCCGGG GCAGUGGG | 8300 |
| 1965 | UGCGUCAA G ACCUGCCC | 3351 | GGGCAGGU GGAGGAAACUCC CU UCAAGGACAUCGUCCGGG UUGACGCA | 8301 |
| 1970 | CAAGACCU G CCCGGCAG | 2368 | CUGCCGGG GGAGGAAACUCC CU UCAAGGACAUCGUCCGGG AGGUCUUG | 8302 |
| 1974 | ACCUGCCC G GCAGGAGU | 3352 | ACUCCUGC GGAGGAAACUCC CU UCAAGGACAUCGUCCGGG GGGCAGGU | 8303 |
| 1975 | CCUGCCCG G CAGGAGUC | 2369 | GACUCCUG GGAGGAAACUCC CU UCAAGGACAUCGUCCGGG CGGGCAGG | 8304 |
| 1978 | GCCCGGCA G GAGUCAUG | 3353 | CAUGACUC GGAGGAAACUCC CU UCAAGGACAUCGUCCGGG UGCCGGGC | 8305 |
| 1979 | CCCGGCAG G AGUCAUGG | 3354 | CCAUGACU GGAGGAAACUCC CU UCAAGGACAUCGUCCGGG CUGCCGGG | 8306 |
| 1981 | CGGCAGGA G UCAUGGGA | 2370 | UCCCAUGA GGAGGAAACUCC CU UCAAGGACAUCGUCCGGG UCCUGCCG | 8307 |
| 1986 | GGAGUCAU G GGAGAAAA | 3355 | UUUUCUCC GGAGGAAACUCC CU UCAAGGACAUCGUCCGGG AUGACUCC | 8308 |
| 1987 | GAGUCAUG G GAGAAAAC | 3356 | GUUUUCUC GGAGGAAACUCC CU UCAAGGACAUCGUCCGGG CAUGACUC | 8309 |
| 1988 | AGUCAUGG G AGAAAACA | 3357 | UGUUUUCU GGAGGAAACUCC CU UCAAGGACAUCGUCCGGG CCAUGACU | 8310 |
| 1990 | UCAUGGGA G AAAACAAC | 3358 | GUUGUUUU GGAGGAAACUCC CU UCAAGGACAUCGUCCGGG UCCCAUGA | 8311 |
| 2004 | AACACCCU G GUCUGGAA | 3359 | UUCCAGAC GGAGGAAACUCC CU UCAAGGACAUCGUCCGGG AGGGUGUU | 8312 |
| 2005 | ACACCCUG G UCUGGAAG | 2371 | CUUCCAGA GGAGGAAACUCC CU UCAAGGACAUCGUCCGGG CAGGGUGU | 8313 |
| 2009 | CCUGGUCU G GAAGUACG | 3360 | CGUACUUC GGAGGAAACUCC CU UCAAGGACAUCGUCCGGG AGACCAGG | 8314 |
| 2010 | CUGGUCUG G AAGUACGC | 3361 | GCGUACUU GGAGGAAACUCC CU UCAAGGACAUCGUCCGGG CAGACCAG | 8315 |
| 2013 | GUCUGGAA G UACGCAGA | 2372 | UCUGCGUA GGAGGAAACUCC CU UCAAGGACAUCGUCCGGG UUCCAGAC | 8316 |
| 2017 | GGAAGUAC G CAGACGCC | 2373 | GGCGUCUG GGAGGAAACUCC CU UCAAGGACAUCGUCCGGG GUACUUCC | 8317 |
| 2020 | AGUACGCA G ACGCCGGC | 3362 | GCCGGCGU GGAGGAAACUCC CU UCAAGGACAUCGUCCGGG UGCGUACU | 8318 |
| 2023 | ACGCAGAC G CCGGCCAU | 2374 | AUGGCCGG GGAGGAAACUCC CU UCAAGGACAUCGUCCGGG GUCUGCGU | 8319 |
| 2026 | CAGACGCC G GCCAUGUG | 3353 | CACAUGGC GGAGGAAACUCC CU UCAAGGACAUCGUCCGGG GGCGUCUG | 8320 |
| 2027 | AGACGCCG G CCAUGUGU | 2375 | ACACAUGG GGAGGAAACUCC CU UCAAGGACAUCGUCCGGG CGGCGUCU | 8321 |
| 2032 | CCGGCCAU G UGUGCCAC | 2376 | GUGGCACA GGAGGAAACUCC CU UCAAGGACAUCGUCCGGG AUGGCCGG | 8322 |
| 2034 | GGCCAUGU G UGCCACCU | 2377 | AGGUGGCA GGAGGAAACUCC CU UCAAGGACAUCGUCCGGG ACAUGGCC | 8323 |
| 2036 | CCAUGUGU G CCACCUGU | 2378 | ACAGGUGG GGAGGAAACUCC CU UCAAGGACAUCGUCCGGG ACACAUGG | 8324 |
| 2043 | UGCCACCU G UGCCAUCC | 2379 | GGAUGGCA GGAGGAAACUCC CU UCAAGGACAUCGUCCGGG AGGUGGCA | 8325 |
| 2045 | CCACCUGU G CCAUCCAA | 2380 | UUGGAUGG GGAGGAAACUCC CU UCAAGGACAUCGUCCGGG ACAGGUGG | 8326 |
| 2057 | UCCAAACU G CACCUACG | 2381 | CGUAGGUG GGAGGAAACUCC CU UCAAGGACAUCGUCCGGG AGUUUGGA | 8327 |
| 2065 | GCACCUAC G GAUGCACU | 3364 | AGUGCAUC GGAGGAAACUCC CU UCAAGGACAUCGUCCGGG GUAGGUGC | 8328 |
| 2066 | CACCUACG G AUGCACUG | 3365 | CAGUGCAU GGAGGAAACUCC CU UCAAGGACAUCGUCCGGG CGUAGGUG | 8329 |
| 2069 | CUACGGAU G CACUGGGC | 2382 | GCCCAGUG GGAGGAAACUCC CU UCAAGGACAUCGUCCGGG AUCCGUAG | 8330 |
| 2074 | GAUGCACU G GGCCAGGU | 3366 | ACCUGGCC GGAGGAAACUCC CU UCAAGGACAUCGUCCGGG AGUGCAUC | 8331 |
| 2075 | AUGCACUG G GCCAGGUC | 3367 | GACCUGGC GGAGGAAACUCC CU UCAAGGACAUCGUCCGGG CAGUGCAU | 8332 |
| 2076 | UGCACUGG G CCAGGUCU | 2383 | AGACCUGG GGAGGAAACUCC CU UCAAGGACAUCGUCCGGG CCAGUGCA | 8333 |
| 2080 | CUGGGCCA G GUCUUGAA | 3368 | UUCAAGAC GGAGGAAACUCC CU UCAAGGACAUCGUCCGGG UGGCCCAG | 8334 |
| 2081 | UGGGCCAG G UCUUGAAG | 2384 | CUUCAAGA GGAGGAAACUCC CU UCAAGGACAUCGUCCGGG CUGGCCCA | 8335 |
| 2086 | CAGGUCUU G AAGGCUGU | 3369 | ACAGCCUU GGAGGAAACUCC CU UCAAGGACAUCGUCCGGG AAGACCUG | 8336 |
| 2089 | GUCUUGAA G GCUGUCCA | 3370 | UGGACAGC GGAGGAAACUCC CU UCAAGGACAUCGUCCGGG UUCAAGAC | 8337 |
| 2090 | UCUUGAAG G CUGUCCAA | 2385 | UUGGACAG GGAGGAAACUCC CU UCAAGGACAUCGUCCGGG CUUCAAGA | 8338 |
| 2093 | UGAAGGCU G UCCAACGA | 2386 | UCGUUGGA GGAGGAAACUCC CU UCAAGGACAUCGUCCGGG AGCCUUCA | 8339 |
| 2100 | UGUCCAAC G AAUGGGCC | 3371 | GGCCCAUU GGAGGAAACUCC CU UCAAGGACAUCGUCCGGG GUUGGACA | 8340 |
| 2104 | CAACGAAU G GGCCUAAG | 3372 | CUUAGGCC GGAGGAAACUCC CU UCAAGGACAUCGUCCGGG AUUCGUUG | 8341 |
| 2105 | AACGAAUG G GCCUAAGA | 3373 | UCUUAGGC GGAGGAAACUCC CU UCAAGGACAUCGUCCGGG CAUUCUGG | 8342 |
| 2106 | ACGAAUGG G CCUAAGAU | 2387 | AUCUUAGG GGAGGAAACUCC CU UCAAGGACAUCGUCCGGG CCAUUCGU | 8343 |
| 2112 | GGGCCUAA G AUCCCGUC | 3374 | GACGGGAU GGAGGAAACUCC CU UCAAGGACAUCGUCCGGG UUAGGCCC | 8344 |
| 2118 | AAGAUCCC G UCCAUCGC | 2388 | GCGAUGGA GGAGGAAACUCC CU UCAAGGACAUCGUCCGGG GGGAUCUU | 8345 |
| 2125 | CGUCCAUC G CCACUGGG | 2389 | CCCAGUGG GGAGGAAACUCC CU UCAAGGACAUCGUCCGGG GAUGGACG | 8346 |
| 2131 | UCGCCACU G GGAUGGUG | 3375 | CACCAUCC GGAGGAAACUCC CU UCAAGGACAUCGUCCGGG AGUGGCGA | 8347 |
| 2132 | CGCCACUG G GAUGGUGG | 3376 | CCACCAUC GGAGGAAACUCC CU UCAAGGACAUCGUCCGGG CAGUGGCG | 8348 |
| 2133 | GCCACUGG G AUGGUGGG | 3377 | CCCACCAU GGAGGAAACUCC CU UCAAGGACAUCGUCCGGG CCAGUGGC | 8349 |
| 2136 | ACUGGGAU G GUGGGGGC | 3378 | GCCCCCAC GGAGGAAACUCC CU UCAAGGACAUCGUCCGGG AUCCCAGU | 8350 |
| 2137 | CUGGGAUG G UGGGGGCC | 2390 | GGCCCCCA GGAGGAAACUCC CU UCAAGGACAUCGUCCGGG CAUCCCAG | 8351 |
| 2139 | GGGAUGGU G GGGGCCCU | 3379 | AGGGCCCC GGAGGAAACUCC CU UCAAGGACAUCGUCCGGG ACCAUCCC | 8352 |
| 2140 | GGAUGGUG G GGGCCCUC | 3380 | GAGGGCCC GGAGGAAACUCC CU UCAAGGACAUCGUCCGGG CACCAUCC | 8353 |
| 2141 | GAUGGUGG G GGCCCUCC | 3381 | GGAGGGCC GGAGGAAACUCC CU UCAAGGACAUCGUCCGGG CCACCAUC | 8354 |
| 2142 | AUGGUGGG G GCCCUCCU | 3382 | AGGAGGGC GGAGGAAACUCC CU UCAAGGACAUCGUCCGGG CCCACCAU | 8355 |
| 2143 | UGGUGGGG G CCCUCCUC | 2388 | GAGGAGGG GGAGGAAACUCC CU UCAAGGACAUCGUCCGGG CCCCACCA | 8356 |
| 2154 | CUCCUCUU G CUGCUGGU | 2389 | ACCAGCAG GGAGGAAACUCC CU UCAAGGACAUCGUCCGGG AAGAGGAC | 8357 |
| 2157 | CUCUUGCU G CUGGUGGU | 2393 | ACCACCAG GGAGGAAACUCC CU UCAAGGACAUCGUCCGGG AGCAAGAG | 8358 |
| 2160 | UUGCUGCU G GUGGUGGC | 3383 | GCCACCAC GGAGGAAACUCC CU UCAAGGACAUCGUCCGGG AGCAGCAA | 8359 |
| 2161 | UGCUGCUG G UGGUGGCC | 3394 | AGGGCCAC GGAGGAAACUCC CU UCAAGGACAUCGUCCGGG ACCAGCAG | 8361 |
| 2163 | CUGCUGGU G GUGGCCCU | 3384 | GCCCCCAC GGAGGAAACUCC CU UCAAGGACAUCGUCCGGG AUCCCAGU | 8350 |
| 2164 | UGCUGGUG G UGGCCCUG | 2395 | CAGGGCCA GGAGGAAACUCC CU UCAAGGACAUCGUCCGGG CACCAGCA | 8362 |
| 2166 | CUGGUGGU G GCCCUGGG | 3385 | CCCAGGGC GGAGGAAACUCC CU UCAAGGACAUCGUCCGGG ACCACCAG | 8363 |
| 2167 | UGGUGGUG G CCCUGGGG | 2396 | CCCCAGGG GGAGGAAACUCC CU UCAAGGACAUCGUCCGGG CACCACCA | 8364 |
| 2172 | GUGGCCCU G GGGAUCGG | 3386 | CCGAUCCC GGAGGAAACUCC CU UCAAGGACAUCGUCCGGG AGGGCCAC | 8365 |
| 2173 | UGGCCCUG G GGAUCGGC | 3387 | GCCGAUCC GGAGGAAACUCC CU UCAAGGACAUCGUCCGGG CAGGGCCA | 8366 |
| 2174 | GGCCCUGG G GAUCGGCC | 3388 | GGCCGAUC GGAGGAAACUCC CU UCAAGGACAUCGUCCGGG CCAGGGCC | 8367 |
| 2175 | GCCCUGGG G AUCGGCCU | 3389 | AGGCCGAU GGAGGAAACUCC CU UCAAGGACAUCGUCCGGG CCCAGGGC | 8368 |
| 2179 | UGGGGAUC G GCCUCUUC | 3390 | GAAGAGGC GGAGGAAACUCC CU UCAAGGACAUCGUCCGGG GAUCCCCA | 8369 |
| 2180 | GGGGAUCG G CCUCUUCA | 2397 | UGAAGAGG GGAGGAAACUCC CU UCAAGGACAUCGUCCGGG CGAUCCCC | 8370 |
| 2190 | CUCUUCAU G CGAAGGCG | 2398 | CGCCUUCG GGAGGAAACUCC CU UCAAGGACAUCGUCCGGG AUGAAGAG | 8371 |
| 2192 | CUUCAUGC G AAGGCGCC | 3391 | GGCGCCUU GGAGGAAACUCC CU UCAAGGACAUCGUCCGGG GCAUGAAG | 8372 |
| 2195 | CAUGCGAA G GCGCCACA | 3392 | UGUGGCGC GGAGGAAACUCC CU UCAAGGACAUCGUCCGGG UUCGCAUG | 8373 |
| 2196 | AUGCGAAG G CGCCACAU | 2399 | AUGUGGCG GGAGGAAACUCC CU UCAAGGACAUCGUCCGGG CUUCGCAU | 8374 |
| 2198 | GCGAAGGC G CCACAUCG | 2400 | CGAUGUGG GGAGGAAACUCC CU UCAAGGACAUCGUCCGGG GCCUUCGC | 8375 |
| 2206 | GCCACAUC G UUCGGAAG | 2401 | CUUCCGAA GGAGGAAACUCC CU UCAAGGACAUCGUCCGGG GAUGUGGC | 8376 |
| 2210 | CAUCGUUC G GAAGCGCA | 3393 | UGCGCUUC GGAGGAAACUCC CU UCAAGGACAUCGUCCGGG GAACGAUG | 8377 |
| 2211 | AUCGUUCG G AAGCGCAC | 3394 | GUGCGCUU GGAGGAAACUCC CU UCAAGGACAUCGUCCGGG CGAACGAU | 8378 |
| 2214 | GUUCGGAA G CGCACGCU | 2402 | AGCGUGCG GGAGGAAACUCC CU UCAAGGACAUCGUCCGGG UUCCGAAC | 8379 |
| 2216 | UCGGAAGC G CACGCUGC | 2403 | GCAGCGUG GGAGGAAACUCC CU UCAAGGACAUCGUCCGGG GCUUCCGA | 8380 |
| 2220 | AAGCGCAC G CUGCGGAG | 2404 | CUCCGCAG GGAGGAAACUCC CU UCAAGGACAUCGUCCGGG GUGCGCUU | 8381 |
| 2223 | CGCACGCU G CGGAGGCU | 2405 | AGCCUCCG GGAGGAAACUCC CU UCAAGGACAUCGUCCGGG AGCGUGCG | 8382 |
| 2225 | CACGCUGC G GAGGCUGC | 3395 | GCAGCCUC GGAGGAAACUCC CU UCAAGGACAUCGUCCGGG GCAGCGUG | 8383 |
| 2226 | ACGCUGCG G AGGCUGCU | 3396 | AGCAGCCU GGAGGAAACUCC CU UCAAGGACAUCGUCCGGG CGCAGCGU | 8384 |
| 2228 | GCUGCGGA G GCUGCUGC | 3397 | GCAGCAGC GGAGGAAACUCC CU UCAAGGACAUCGUCCGGG UCCGCAGC | 8385 |
| 2229 | CUGCGGAG G CUGCUGCA | 2406 | UGCAGCAG GGAGGAAACUCC CU UCAAGGACAUCGUCCGGG CUCCGCAG | 8386 |
| 2232 | CGGAGGCU G CUGCAGGA | 2407 | UCCUGCAG GGAGGAAACUCC CU UCAAGGACAUCGUCCGGG AGCCUCCG | 8387 |
| 2235 | AGGCUGCU G CAGGAGAG | 2408 | CUCUCCUG GGAGGAAACUCC CU UCAAGGACAUCGUCCGGG AGCAGCCU | 8388 |
| 2238 | CUGCUGCA G GAGAGGGA | 3398 | UCCCUCUC GGAGGAAACUCC CU UCAAGGACAUCGUCCGGG UGCAGCAG | 8389 |
| 2239 | UGCUGCAG G AGAGGGAG | 3399 | CUCCCUCU GGAGGAAACUCC CU UCAAGGACAUCGUCCGGG CUGCAGCA | 8390 |
| 2241 | CUGCAGGA G AGGGAGCU | 3400 | AGCUCCCU GGAGGAAACUCC CU UCAAGGACAUCGUCCGGG UCCUGCAG | 8391 |
| 2243 | GCAGGAGA G GGAGCUUG | 3401 | CAAGCUCC GGAGGAAACUCC CU UCAAGGACAUCGUCCGGG UCUCCUGC | 8392 |
| 2244 | CAGGAGAG G GAGCUUGU | 3402 | ACAAGCUC GGAGGAAACUCC CU UCAAGGACAUCGUCCGGG CYCYCCUG | 8393 |
| 2245 | AGGAGAGG G AGCUUGUG | 3403 | CACAAGCU GGAGGAAACUCC CU UCAAGGACAUCGUCCGGG CCUCUCCU | 8394 |
| 2247 | GAGAGGGA G CUUGUGGA | 2409 | UCCACAAG GGAGGAAACUCC CU UCAAGGACAUCGUCCGGG UCCCUCUC | 8395 |
| 2251 | GGGAGCUU G UGGAGCCU | 2410 | AGGCUCCA GGAGGAAACUCC CU UCAAGGACAUCGUCCGGG AAGCUCCC | 8396 |
| 2253 | GAGCUUGU G GAGCCUCU | 3404 | AGAGGCUC GGAGGAAACUCC CU UCAAGGACAUCGUCCGGG ACAAGCUC | 8397 |
| 2254 | AGCUUGUG G AGCCUCUU | 3405 | AAGAGGCU GGAGGAAACUCC CU UCAAGGACAUCGUCCGGG CACAAGCU | 8398 |
| 2256 | CUUGUGGA G CCUCUUAC | 2411 | GUAACAGG GGAGGAAACUCC CU UCAAGGACAUCGUCCGGG UCCACAAG | 8399 |
| 2270 | UACACCCA G UGGAGAAG | 2412 | CUUCUCCA GGAGGAAACUCC CU UCAAGGACAUCGUCCGGG UGGGUGUA | 8400 |
| 2272 | CACCCAGU G GAGAAGCU | 3406 | AGCUUCUC GGAGGAAACUCC CU UCAAGGACAUCGUCCGGG ACUGGGUG | 8401 |
| 2273 | ACCCAGUG G AGAAGCUC | 3407 | GAGCUUCU GGAGGAAACUCC CU UCAAGGACAUCGUCCGGG CACUGGGU | 8402 |
| 2275 | CCAGUGGA G AAGCUCCC | 3408 | GGGAGCUU GGAGGAAACUCC CU UCAAGGACAUCGUCCGGG UCCACUGG | 8403 |
| 2278 | GUGGAGAA G CUCCCAAC | 2413 | GUUGGGAG GGAGGAAACUCC CU UCAAGGACAUCGUCCGGG UUCUCCAC | 8404 |
| 2290 | CCAACCAA G CUCUCUUG | 2414 | CAAGAGAG GGAGGAAACUCC CU UCAAGGACAUCGUCCGGG UUGGUUGG | 8405 |
| 2298 | GCUCUCUU G AGGAUCUU | 3409 | AAGAUCCU GGAGGAAACUCC CU UCAAGGACAUCGUCCGGG AAGAGAGC | 8406 |
| 2300 | UCUCUUGA G GAUCUUGA | 3410 | UCAAGAUC GGAGGAAACUCC CU UCAAGGACAUCGUCCGGG UCAAGAGA | 8407 |
| 2301 | CUCUUGAG G AUCUUGAA | 3411 | UUCAAGAU GGAGGAAACUCC CU UCAAGGACAUCGUCCGGG CUCAAGAG | 8408 |
| 2307 | AGGAUCUU G AAGGAAAC | 3412 | GUUUCCUU GGACGAAACUCC CU UCAAGGACAUCGUCCGGG AAGAUCCU | 8409 |
| 2310 | AUCUUGAA G GAAACUGA | 3413 | UCAGUUUC GGAGGAAACUCC CU UCAAGGACAUCGUCCGGG UUCAAGAU | 8410 |
| 2311 | UCUUGAAG G AAACUGAA | 3414 | UUCAGUUU GGAGGAAACUCC CU UCAAGGACAUCGUCCGGG CUUCAAGA | 8411 |
| 2317 | AGGAAACU G AAUUCAAA | 3415 | UUUGAAUU GGAGGAAACUCC CU UCAAGGACAUCGUCCGGG AGUUUCCU | 8412 |
| 2328 | UUCAAAAA G AUCAAAGU | 3416 | ACUUUGAU GGAGGAAACUCC CU UCAAGGACAUCGUCCGGG UUUUUGAA | 8413 |
| 2335 | AGAUCAAA G UGCUGGGC | 2415 | GCCCAGCA GGAGGAAACUCC CU UCAAGGACAUCGUCCGGG UUUGAUCU | 8414 |
| 2337 | AUCAAAGU G CUGGGCUC | 2416 | GAGCCCAG GGAGGAAACUCC CU UCAAGGACAUCGUCCGGG ACUUUGAU | 8415 |
| 2340 | AAAGUGCU G GGCUCCGG | 3417 | CCGGAGCC GGAGGAAACUCC CU UCAAGGACAUCGUCCGGG AGCACUUU | 8416 |
| 2341 | AAGUGCUG G GCUCCGGU | 3418 | ACCGGAGC GGAGGAAACUCC CU UCAAGGACAUCGUCCGGG CAGCACUU | 8417 |
| 2342 | AGUGCUGG G CUCCGGUG | 2417 | CACCGGAG GGAGGAAACUCC CU UCAAGGACAUCGUCCGGG CCAGCACU | 8418 |
| 2347 | UGGGCUCC G GUGCGUUC | 3419 | GAACGCAC GGAGGAAACUCC CU UCAAGGACAUCGUCCGGG GGAGCCCA | 8419 |
| 2348 | GGGCUCCG G UGCGUUCG | 2418 | CGAACGCA GGAGGAAACUCC CU UCAAGGACAUCGUCCGGG CGGAGCCC | 8420 |
| 2350 | GCUCCGGU G CGUUCGGC | 2419 | GCCGAACG GGAGGAAACUCC CU UCAAGGACAUCGUCCGGG ACCGGAGC | 8421 |
| 2352 | UCCGGUGC G UUCGGCAC | 2420 | GUGCCGAA GGAGGAAACUCC CU UCAAGGACAUCGUCCGGG GCACCGGA | 8422 |
| 2356 | GUGCGUUC G GCACGGUG | 3420 | CACCGUGC GGAGGAAACUCC CU UCAAGGACAUCGUCCGGG GAACGCAC | 8423 |
| 2357 | UGCGUUCG G CACGGUGU | 2421 | ACACCGUG GGAGGAAACUCC CU UCAAGGACAUCGUCCGGG CGAACGCA | 8424 |
| 2361 | UUCGGCAC G GUGUAUAA | 3421 | UUAUACAC GGAGGAAACUCC CU UCAAGGACAUCGUCCGGG GUGCCGAA | 8425 |
| 2362 | UCGGCACG G UGUAUAAG | 2422 | CUUAUACA GGAGGAAACUCC CU UCAAGGACAUCGUCCGGG CGUGCCGA | 8426 |
| 2364 | GGCACGGU G UAUAAGGG | 2423 | CCCUUAUA GGAGGAAACUCC CU UCAAGGACAUCGUCCGGG ACCGUGCC | 8427 |
| 2370 | GUGUAUAA G GGACUCUG | 3422 | CAGAGUCC GGAGGAAACUCC CU UCAAGGACAUCGUCCGGG UUAUACAC | 8428 |
| 2371 | UGUAUAAG G GACUCUGG | 3423 | CCAGAGUC GGAGGAAACUCC CU UCAAGGACAUCGUCCGGG CUUAUACA | 8429 |
| 2372 | GUAUAAGG G ACUCUGGA | 3424 | UCCAGAGU GGAGGAAACUCC CU UCAAGGACAUCGUCCGGG CCUUAUAC | 8430 |
| 2378 | GGGACUCU G GAUCCCAG | 3425 | CUGGGAUC GGAGGAAACUCC CU UCAAGGACAUCGUCCGGG AGAGUCCC | 8431 |
| 2379 | GGACUCUG G AUCCCAGA | 3426 | UCUGGGAU GGAGGAAACUCC CU UCAAGGACAUCGUCCGGG CAGAGUCC | 8432 |
| 2386 | GGAUCCCA G AAGGUGAG | 3427 | CUCACCUU GGAGGAAACUCC CU UCAAGGACAUCGUCCGGG UGGGAUCC | 8433 |
| 2389 | UCCCAGAA G GUGAGAAA | 3428 | UUUCUCAC GGAGGAAACUCC CU UCAAGGACAUCGUCCGGG UUCUGGGA | 8434 |
| 2390 | CCCAGAAG G UGAGAAAG | 2424 | CUUUCUCA GGAGGAAACUCC CU UCAAGGACAUCGUCCGGG CUUCUGGG | 8435 |
| 2392 | CAGAAGGU G AGAAAGUU | 3429 | AACUUUCU GGAGGAAACUCC CU UCAAGGACAUCGUCCGGG ACCUUCUG | 8436 |
| 2394 | GAAGGUGA G AAAGUUAA | 3430 | UUAACUUU GGAGGAAACUCC CU UCAAGGACAUCGUCCGGG UCACCUUC | 8437 |
| 2398 | GUGAGAAA G UUAPAAUU | 2425 | AAUUUUAA GGAGGAAACUCC CU UCAAGGACAUCGUCCGGG UUUCUCAC | 8438 |
| 2410 | AAAUUCCC G UCGCUAUC | 2426 | GAUAGCGA GGAGGAAACUCC CU UCAAGGACAUCGUCCGGG GGGAAUUU | 8439 |
| 2413 | UUCCCGUC G CUAUCAAG | 2427 | CUUGAUAG GGAGGAAACUCC CU UCAAGGACAUCGUCCGGG GACGGGAA | 8440 |
| 2421 | GCUAUCAA G GAAUUAAG | 3431 | CUUAAUUC GGAGGAAACUCC CU UCAAGGACAUCGUCCGGG UUGAUAGC | 8441 |
| 2422 | CUAUCAAG G AAUUAAGA | 3432 | UCUUAAUU GGAGGAAACUCC CU UCAAGGACAUCGUCCGGG CUUGAUAG | 8442 |
| 2429 | GGAAUUAA G AGAAGCAA | 3433 | UUGCUUCU GGAGGAAACUCC CU UCAAGGACAUCGUCCGGG UUAAUUCC | 8443 |
| 2431 | AAUUAAGA G AAGCAACA | 3434 | UGUUGCUU GGAGGAAACUCC CU UCAAGGACAUCGUCCGGG UCUUAAUU | 8444 |
| 2434 | UAAGAGAA G CAACAUCU | 2428 | AGAUGUUG GGAGGAAACUCC CU UCAAGGACAUCGUCCGGG UUCUCUUA | 8445 |
| 2445 | ACAUCUCC G AAAGCCAA | 3435 | UUGGCUUU GGAGGAAACUCC CU UCAAGGACAUCGUCCGGG GGAGAUGU | 8446 |
| 2449 | CUCCGAAA G CCAACAAG | 2429 | CUUGUUGG GGAGGAAACUCC CU UCAAGGACAUCGUCCGGG UUUCGGAG | 8447 |
| 2457 | GCCAACAA G GAAAUCCU | 3436 | AGGAUUUC GGAGGAAACUCC CU UCAAGGACAUCGUCCGGG UUGUUGGC | 8448 |
| 2458 | CCAACAAG G AAAUCCUC | 3437 | GAGGAUUU GGAGGAAACUCC CU UCAAGGACAUCGUCCGGG CUUGUUGG | 8449 |
| 2467 | AAAUCCUC G AUGAAGCC | 3438 | GGCUUCAU GGAGGAAACUCC CU UCAAGGACAUCGUCCGGG GAGGAUUU | 8450 |
| 2470 | UCCUCGAU G AAGCCUAC | 3439 | GUAGGCUU GGAGGAAACUCC CU UCAAGGACAUCGUCCGGG AUCGAGGA | 8451 |
| 2473 | UCGAUGAA G CCUACGUG | 2430 | CACGUAGG GGAGGAAACUCC CU UCAAGGACAUCGUCCGGG UUCAUCGA | 8452 |
| 2479 | AAGCCUAC G UGAUGGCC | 2431 | GGCCAUCA GGAGGAAACUCC CU UCAAGGACAUCGUCCGGG GUAGGCUU | 8453 |
| 2481 | GCCUACGU G AUGGCCAG | 3440 | CUGGCCAU GGAGGAAACUCC CU UCAAGGACAUCGUCCGGG ACGUAGGC | 8454 |
| 2484 | UACGUGAU G GCCAGCGU | 3441 | ACGCUGGC GGAGGAAACUCC CU UCAAGGACAUCGUCCGGG AUCACGUA | 8455 |
| 2485 | ACGUGAUG G CCAGCGUG | 2432 | CACGCUGG GGAGGAAACUCC CU UCAAGGACAUCGUCCGGG CAUCACGU | 8456 |
| 2489 | GAUGGCCA G CGUGGACA | 2433 | UGUCCACG GGAGGAAACUCC CU UCAAGGACAUCGUCCGGG UGGCCAUC | 8457 |
| 2491 | UGGCCAGC G UGGACAAC | 2434 | GUUGUCCA GGAGGAAACUCC CU UCAAGGACAUCGUCCGGG GCUGGCCA | 8458 |
| 2493 | GCCAGCGU G GACAACCC | 3442 | GGGUUGUC GGAGGAAACUCC CU UCAAGGACAUCGUCCGGG ACGCUGGC | 8459 |
| 2494 | CCAGCGUG G ACAACCCC | 3443 | GGGGUUGU GGAGGAAACUCC CU UCAAGGACAUCGUCCGGG CACGCUGG | 8460 |
| 2506 | ACCCCCAC G UGUGCCGC | 2435 | GCGGCACA GGAGGAAACUCC CU UCAAGGACAUCGUCCGGG GUGGGGGU | 8461 |
| 2508 | CCCCACGU G UGCCGCCU | 2436 | AGGCGGCA GGAGGAAACUCC CU UCAAGGACAUCGUCCGGG ACGUGGGG | 8462 |
| 2510 | CCACGUGU G CCGCCUGC | 2437 | GCAGGCGG GGAGGAAACUCC CU UCAAGGACAUCGUCCGGG ACACGUGG | 8463 |
| 2513 | CGUGUGCC G CCUGCUGG | 2438 | CCAGCAGG GGAGGAAACUCC CU UCAAGGACAUCGUCCGGG GGCACACG | 8464 |
| 2517 | UGCCGCCU G CUGGGCAU | 2439 | AUGCCCAG GGAGGAAACUCC CU UCAAGGACAUCGUCCGGG AGGCGGCA | 8465 |
| 2520 | CGCCUGCU G GGCAUCUG | 3444 | CAGAUGCC GGAGGAAACUCC CU UCAAGGACAUCGUCCGGG AGCAGGCG | 8466 |
| 2521 | GCCUGCUG G UCAUCUGC | 3445 | GCAGAUGC GGAGGAAACUCC CU UCAAGGACAUCGUCCGGG CAGCAGGC | 8467 |
| 2522 | CCUGCUGG G CAUCUGCC | 2440 | GGCAGAUG GGAGGAAACUCC CU UCAAGGACAUCGUCCGGG CCAGCAGG | 8458 |
| 2528 | GGGCAUCU G CCUCACCU | 2441 | AGGUGAGG GGAGGAAACUCC CU UCAAGGACAUCGUCCGGG AGAUGCCC | 8469 |
| 2542 | CCUCCACC G UGCAACUC | 2442 | GAGUUGCA GGAGGAAACUCC CU UCAAGGACAUCGUCCGGG GGUGGAGG | 8470 |
| 2544 | UCCACCGU G CAACUCAU | 2443 | AUGAGUUG GGAGGAAACUCC CU UCAAGGACAUCGUCCGGG ACGGUGGA | 8471 |
| 2556 | CUCAUCAC G CAGCUCAU | 2444 | AUGAGCUG GGAGGAAACUCC CU UCAAGGACAUCGUCCGGG GUGAUGAG | 8472 |
| 2559 | AUCACGCA G CUCAUGCC | 2435 | GGCAUGAG GGAGGAAACUCC CU UCAAGGACAUCGUCCGGG UGCGUGAU | 8473 |
| 2565 | CAGCUCAU G CCCUUCGG | 2446 | CCGAAGGG GGAGGAAACUCC CU UCAAGGACAUCGUCCGGG AUGAGCUG | 8474 |
| 2572 | UGCCCUUC G GCUGCCUC | 3446 | GAGGCAGC GGAGGAAACUCC CU UCAAGGACAUCGUCCGGG GAAGGGCA | 8475 |
| 2573 | GCCCUUCG G CUGCCUCC | 2447 | GGAGGCAG GGAGGAAACUCC CU UCAAGGACAUCGUCCGGG CGAAGGGC | 8476 |
| 2576 | CUUCGGCU G CCUCCUGG | 2448 | CCAGGAGG GGAGGAAACUCC CU UCAAGGACAUCGUCCGGG AGCCGAAG | 8477 |
| 2583 | UGCCUCCU G GACUAUGU | 3447 | ACAUAGUC GGAGGAAACUCC CU UCAAGGACAUCGUCCGGG AGGAGGCA | 8478 |
| 2584 | GCCUCCUG G ACUAUGUC | 3448 | GACAUAGU GGAGGAAACUCC CU UCAAGGACAUCGUCCGGG CAGGAGGC | 8479 |
| 2590 | UGGACUAU G UCCGGGAA | 2449 | UUCCCGGA GGAGGAAACUCC CU UCAAGGACAUCGUCCGGG AUAGUCCA | 8480 |
| 2594 | CUAUGUCC G GGAACACA | 3449 | UGUGUUCC GGAGGAAACUCC CU UCAAGGACAUCGUCCGGG GGACAUAG | 8481 |
| 2595 | UAUGUCCG G GAACACAA | 3450 | UUGUGUUC GGAGGAAACUCC CU UCAAGGACAUCGUCCGGG CGGACAUA | 8482 |
| 2596 | AUGUCCGG G AACACAAA | 3451 | UUUGUGUU GGAGGAAACUCC CU UCAAGGACAUCGUCCGGG CCGGACAU | 8483 |
| 2605 | AACACAAA G ACAAUAUU | 3452 | AAUAUUGU GGAGGAAACUCC CU UCAAGGACAUCGUCCGGG UUUGUGUU | 8484 |
| 2614 | ACAAUAUU G GCUCCCAG | 3453 | CUGGGAGC GGAGGAAACUCC CU UCAAGGACAUCGUCCGGG AAUAUUGU | 8885 |
| 2615 | CAAUAUUG G CUCCCAGU | 2450 | ACUGGGAG GGAGGAAACUCC CU UCAAGGACAUCGUCCGGG CAAUAUUG | 8486 |
| 2622 | GGCUCCCA G UACCUGCU | 2451 | AGCAGGUA GGAGGAAACUCC CU UCAAGGACAUCGUCCGGG UGGGAGCC | 8487 |
| 2628 | CAGUACCU G CUCAACUG | 2452 | CAGUUGAG GGAGGAAACUCC CU UCAAGGACAUCGUCCGGG AGGUACUG | 8488 |
| 2636 | GCUCAACU G GUGUGUGC | 3454 | GCACACAC GGAGGAAACUCC CU UCAAGGACAUCGUCCGGG AGUUGAGC | 8489 |
| 2637 | CUCAACUG G UGUGUGCA | 2453 | UGCACACA GGAGGAAACUCC CU UCAAGGACAUCGUCCGGG CAGUUGAG | 8490 |
| 2639 | CAACUGGU G UGUGCAGA | 2454 | UCUGCACA GGAGGAAACUCC CU UCAAGGACAUCGUCCGGG ACCAGUUG | 8491 |
| 2641 | ACUGGUGU G UGCAGAUC | 2455 | GAUCUGCA GGAGGAAACUCC CU UCAAGGACAUCGUCCGGG ACACCAGU | 8492 |
| 2643 | UGGUGUGU G CAGAUCGC | 2456 | GCGAUCUG GGAGGAAACUCC CU UCAAGGACAUCGUCCGGG ACACACCA | 8493 |
| 2646 | UGUGUGCA G AUCGCAAA | 3455 | UUUGCGAU GGAGGAAACUCC CU UCAAGGACAUCGUCCGGG UGCACACA | 8494 |
| 2650 | UGCAGAUC G CAAAGGGC | 2457 | GCCCUUUG GGAGGAAACUCC CU UCAAGGACAUCGUCCGGG GAUCUGCA | 8495 |
| 2655 | AUCGCAAA G GGCAUGAA | 3456 | UUCAUGCC GGAGGAAACUCC CU UCAAGGACAUCGUCCGGG UUUGCGAU | 8496 |
| 2656 | UCGCAAAG G GCAUGAAC | 3457 | GUUCAUGC GGAGGAAACUCC CU UCAAGGACAUCGUCCGGG CUUUGCGA | 8497 |
| 2657 | CGCAAAGG G CAUGAACU | 2458 | AGUUCAUG GGAGGAAACUCC CU UCAAGGACAUCGUCCGGG CCUUUGCG | 8498 |
| 2661 | AAGGGCAU G AACUACUU | 3458 | AAGUAGUU GGAGGAAACUCC CU UCAAGGACAUCGUCCGGG AUGCCCUU | 8499 |
| 2670 | AACUACUU G GAGGACCG | 3459 | CGGUCCUC GGAGGAAACUCC CU UCAAGGACAUCGUCCGGG AAGUAGUU | 8500 |
| 2671 | ACUACUUG G AGGACCGU | 3460 | ACGGUCCU GGAGGAAACUCC CU UCAAGGACAUCGUCCGGG CAAGUAGU | 8501 |
| 2673 | UACUUGGA G GACCGUCG | 3461 | CGACGGUC GGAGGAAACUCC CU UCAAGGACAUCGUCCGGG UCCAAGUA | 8502 |
| 2674 | ACUUGGAG G ACCGUCGC | 3462 | GCGACGGU GGAGGAAACUCC CU UCAAGGACAUCGUCCGGG CUCCAAGU | 8503 |
| 2678 | GGAGGACC G UCGCUUGG | 2459 | CCAAGCGA GGAGGAAACUCC CU UCAAGGACAUCGUCCGGG GGUCCUCC | 8504 |
| 2681 | GGACCGUC G CUUGGUGC | 2460 | GCACCAAG GGAGGAAACUCC CU UCAAGGACAUCGUCCGGG GACGGUCC | 8505 |
| 2685 | CGUCGCUU G GUGCACCG | 2463 | CGGUGCAC GGAGGAAACUCC CU UCAAGGACAUCGUCCGGG AAGCGACG | 8506 |
| 2686 | GUCGCUUG G UGCACCGC | 3461 | GCGGUGCA GGAGGAAACUCC CU UCAAGGACAUCGUCCGGG CAAGCGAC | 8507 |
| 2688 | CGCUUGGU G CACCGCCA | 2462 | UCGCGGUG GGAGGAAACUCC CU UCAAGGACAUCGUCCGGG ACCAAGCG | 8508 |
| 2693 | GGUGCACC G CGACCUGG | 3463 | CGACCUGG GGAGGAAACUCC CU UCAAGGACAUCGUCCGGG GGUGCACC | 8509 |
| 2695 | UGCACCGC G ACCUGGCA | 3464 | GUUCAUGC GGAGGAAACUCC CU UCAAGGACAUCGUCCGGG CUUUGCGA | 8497 |
| 2700 | CGCGACCU G GCAGCCAG | 3465 | CUGGCUGC GGAGGAAACUCC CU UCAAGGACAUCGUCCGGG AGGUCGCG | 8511 |
| 2701 | GCGACCUG G CAGCCAGG | 2464 | CCUGGCUG GGAGGAAACUCC CU UCAAGGACAUCGUCCGGG CAGGUCGC | 8512 |
| 2704 | ACCUGGCA G CCAGGAAC | 2465 | GUUCCUGG GGAGGAAACUCC CU UCAAGGACAUCGUCCGGG UGCCAGGU | 8513 |
| 2708 | GGCAGCCA G GAACGUAC | 3466 | GUACGUUC GGAGGAAACUCC CU UCAAGGACAUCGUCCGGG UGGCUGCC | 8514 |
| 2709 | GCAGCCAG G AACGUACU | 3467 | AGUACGUU GGAGGAAACUCC CU UCAAGGACAUCGUCCGGG CUGGCUGC | 8515 |
| 2713 | CCAGGAAC G UACUGGUG | 2466 | CACCAGUA GGAGGAAACUCC CU UCAAGGACAUCGUCCGGG CUUCCUGG | 8516 |
| 2718 | AACGUACU G GUGAAAAC | 3468 | GUUUUCAC GGAGGAAACUCC CU UCAAGGACAUCGUCCGGG AGUACGUU | 8517 |
| 2719 | ACGUACUG G UGAAAACA | 2467 | UGUUUUCA GGAGGAAACUCC CU UCAAGGACAUCGUCCGGG CAGUACGU | 8518 |
| 2721 | GUACUGGU G AAAACACC | 3469 | GGUGUUUU GGAGGAAACUCC CU UCAAGGACAUCGUCCGGG ACCAGUAC | 8519 |
| 2730 | AAAACACC G CAGCAUGU | 2468 | ACAUGCUG GGAGGAAACUCC CU UCAAGGACAUCGUCCGGG GGUGUUUU | 8520 |
| 2733 | ACACCGCA G CAUGUCAA | 2469 | UUGACAUG GGAGGAAACUCC CU UCAAGGACAUCGUCCGGG UGCGGUGU | 8521 |
| 2737 | CGCAGCAU G UCAAGAUC | 2470 | GAUCUUGA GGAGGAAACUCC CU UCAAGGACAUCGUCCGGG AUGCUGCG | 8522 |
| 2742 | CAUGUCAA G AUCACAGA | 3470 | UCUGUGAU GGAGGAAACUCC CU UCAAGGACAUCGUCCGGG UUGACAUG | 8523 |
| 2749 | AGAUCACA G AUUUUGGG | 3471 | CCCAAAAU GGAGGAAACUCC CU UCAAGGACAUCGUCCGGG UGUGAUCU | 8524 |
| 2755 | CAGAUUUU G GGCUGGCC | 3472 | GGCCAGCC GGAGGAAACUCC CU UCAAGGACAUCGUCCGGG AAAAUCUG | 8525 |
| 2756 | AGAUUUUG G GCUGGCCA | 3473 | UGGCCAGC GGAGGAAACUCC CU UCAAGGACAUCGUCCGGG CAAAAUCU | 8526 |
| 2757 | GAUUUUGG G CUGGCCAA | 2471 | UUGGCCAG GGAGGAAACUCC CU UCAAGGACAUCGUCCGGG CCAAAAUC | 8527 |
| 2760 | UUUGGGCU G GCCAAACU | 3474 | AGUUUGGC GGAGGAAACUCC CU UCAAGGACAUCGUCCGGG AGCCCAAA | 8528 |
| 2761 | UUGGGCUG G CCAAACUG | 2472 | CAGUUUGG GGAGGAAACUCC CU UCAAGGACAUCGUCCGGG CAGCCCAA | 8529 |
| 2769 | GCCAAACU G CUGGGUGC | 2473 | GCACCCAG GGAGGAAACUCC CU UCAAGGACAUCGUCCGGG AGUUUGGC | 8530 |
| 2772 | AAACUGCU G GGUGCGGA | 3475 | UCCGCACC GGAGGAAACUCC CU UCAAGGACAUCGUCCGGG AGCAGUUU | 8531 |
| 2773 | AACUGCUG G GUGCGGAA | 3476 | UUCCGCAC GGAGGAAACUCC CU UCAAGGACAUCGUCCGGG CAGCAGUU | 8532 |
| 2774 | ACUGCUGG G UGCGGAAG | 2474 | CUUCCGCA GGAGGAAACUCC CU UCAAGGACAUCGUCCGGG CCAGCAGU | 8533 |
| 2776 | UGCUGGGU G CGGAAGAG | 2475 | CUCUUCCG GGAGGAAACUCC CU UCAAGGACAUCGUCCGGG ACCCAGCA | 8534 |
| 2778 | CUGGGUGC G GAAGAGAA | 3477 | UUCUCUUC GGAGGAAACUCC CU UCAAGGACAUCGUCCGGG GCACCCAG | 8535 |
| 2779 | UGGGUGCG G AAGAGAAA | 3478 | UUUCUCUU GGAGGAAACUCC CU UCAAGGACAUCGUCCGGG CGCACCCA | 8536 |
| 2782 | GUGCGGAA G AGAAAGAA | 3479 | UUCUUUCU GGAGGAAACUCC CU UCAAGGACAUCGUCCGGG UUCCGCAC | 8537 |
| 2784 | GCGGAAGA G AAAGAAUA | 3480 | UAUUCUUU GGAGGAAACUCC CU UCAAGGACAUCGUCCGGG UCUUCCGC | 8538 |
| 2788 | AAGAGAAA G AAUACCAU | 3481 | AUGGUAUU GGAGGAAACUCC CU UCAAGGACAUCGUCCGGG UUUCUCUU | 8539 |
| 2797 | AAUACCAU G CAGAAGGA | 2476 | UCCUUCUG GGAGGAAACUCC CU UCAAGGACAUCGUCCGGG AUGGUAUU | 8540 |
| 2800 | ACCAUGCA G AAGGAGGC | 3482 | GCCUCCUU GGAGGAAACUCC CU UCAAGGACAUCGUCCGGG UGCAUGGU | 8541 |
| 2803 | AUGCAGAA G GAGGCAAA | 3483 | UUUGCCUC GGAGGAAACUCC CU UCAAGGACAUCGUCCGGG UUCUGCAU | 8542 |
| 2804 | UGCAGAAG G AGGCAAAG | 3484 | CUUUGCCU GGAGGAAACUCC CU UCAAGGACAUCGUCCGGG CUUCUGCA | 8543 |
| 2806 | CAGAAGGA G GCAAAGUG | 3485 | CACUUUGC GGAGGAAACUCC CU UCAAGGACAUCGUCCGGG UCCUUCUG | 8544 |
| 2807 | AGAAGGAG G CAAAGUGC | 2477 | GCACUUUG GGAGGAAACUCC CU UCAAGGACAUCGUCCGGG CUCCUUCU | 8545 |
| 2812 | GAGGCAAA G UGCCUAUC | 2478 | GAUAGGCA GGAGGAAACUCC CU UCAAGGACAUCGUCCGGG UUUGCCUC | 8546 |
| 2814 | GGCAAAGU G CCUAUCAA | 2479 | UUGAUAGG GGAGGAAACUCC CU UCAAGGACAUCGUCCGGG ACUUUGCC | 8547 |
| 2823 | CCUAUCAA G UGGAUGGC | 2480 | GCCAUCCA GGAGGAAACUCC CU UCAAGGACAUCGUCCGGG UUGAUAGG | 8548 |
| 2825 | UAUCAAGU G GAUGGCAU | 3486 | AUGCCAUC GGAGGAAACUCC CU UCAAGGACAUCGUCCGGG ACUUGAUA | 8549 |
| 2826 | AUCAAGUG G AUGGCAUU | 3487 | AAUGCCAU GGAGGAAACUCC CU UCAAGGACAUCGUCCGGG CACUUGAU | 8550 |
| 2829 | AAGUGGAU G GCAUUGGA | 3488 | UCCAAUGC GGAGGAAACUCC CU UCAAGGACAUCGUCCGGG AUCCACUU | 8551 |
| 2830 | AGUGGAUG G CAUUGGAA | 2481 | UUCCAAUG GGAGGAAACUCC CU UCAAGGACAUCGUCCGGG CAUCCACU | 8552 |
| 2835 | AUGGCAUU G GAAUCAAU | 3489 | AUUGAUUC GGAGGAAACUCC CU UCAAGGACAUCGUCCGGG AAUGCCAU | 8553 |
| 2836 | UGGCAUUG G AAUCAAUU | 3490 | AAUUGAUU GGAGGAAACUCC CU UCAAGGACAUCGUCCGGG CAAUGCCA | 8554 |
| 2852 | UUUACACA G AAUCUAUA | 3491 | UAUAGAUU GGAGGAAACUCC CU UCAAGGACAUCGUCCGGG UGUGUAAA | 8555 |
| 2868 | ACCCACCA G AGUGAUGU | 3492 | ACAUCACU GGAGGAAACUCC CU UCAAGGACAUCGUCCGGG UGGUGGGU | 8556 |
| 2870 | CCACCAGA G UGAUGUCU | 2482 | AGACAUCA GGAGGAAACUCC CU UCAAGGACAUCGUCCGGG UCUGGUGG | 8557 |
| 2872 | ACCAGAGU G AUGUCUGG | 3493 | CCAGACAU GGAGGAAACUCC CU UCAAGGACAUCGUCCGGG ACUCUGGU | 8558 |
| 2875 | AGAGUGAU G UCUGGAGC | 2483 | GCUCCAGA GGAGGAAACUCC CU UCAAGGACAUCGUCCGGG AUCACUCU | 8559 |
| 2879 | UGAUGUCU G GAGCUACG | 3494 | CGUAGCUC GGAGGAAACUCC CU UCAAGGACAUCGUCCGGG AGACAUCA | 8560 |
| 2880 | GAUGUCUG G AGCUACGG | 3495 | CCGUAGCU GGAGGAAACUCC CU UCAAGGACAUCGUCCGGG CAGACAUC | 8561 |
| 2882 | UGUCUGGA G CUACGGGG | 2484 | CCCCGUAG GGAGGAAACUCC CU UCAAGGACAUCGUCCGGG UCCAGACA | 8562 |
| 2887 | GGAGCUAC G GGGUGACC | 3496 | GGUCACCC GGAGGAAACUCC CU UCAAGGACAUCGUCCGGG GUAGCUCC | 8563 |
| 2888 | GAGCUACG G GGUGACCG | 3497 | CGGUCACC GGAGGAAACUCC CU UCAAGGACAUCGUCCGGG CGUAGCUC | 8564 |
| 2889 | AGCUACGG G GUGACCGU | 3498 | ACGGUCAC GGAGGAAACUCC CU UCAAGGACAUCGUCCGGG CCGUAGCU | 8565 |
| 2890 | GCUACGGG G UGACCGUU | 2485 | AACGGUCA GGAGGAAACUCC CU UCAAGGACAUCGUCCGGG CCCGUAGC | 8566 |
| 2892 | UACGGGGU G ACCGUUUG | 3499 | CAAACGGU GGAGGAAACUCC CU UCAAGGACAUCGUCCGGG ACCCCGUA | 8567 |
| 2896 | GGGUGACC G UUUGGGAG | 2486 | CUCCCAAA GGAGGAAACUCC CU UCAAGGACAUCGUCCGGG GGUCACCC | 8568 |
| 2900 | GACCGUUU G GGAGUUGA | 3500 | UCAACUCC GGAGGAAACUCC CU UCAAGGACAUCGUCCGGG AAACGGUC | 8569 |
| 2901 | ACCGUUUG G GAGUUGAU | 3501 | AUCAACUC GGAGGAAACUCC CU UCAAGGACAUCGUCCGGG CAAACGGU | 8570 |
| 2902 | CCGUUUGG G AGUUGAUG | 3502 | CAUCAACU GGAGGAAACUCC CU UCAAGGACAUCGUCCGGG CCAAACGG | 8571 |
| 2904 | GUUUGGGA G UUGAUGAC | 2487 | GUCAUCAA GGAGGAAACUCC CU UCAAGGACAUCGUCCGGG UCCCAAAC | 8572 |
| 2907 | UGGGAGUU G AUGACCUU | 3503 | AAGGUCAU GGAGGAAACUCC CU UCAAGGACAUCGUCCGGG AACUCCCA | 8573 |
| 2910 | GAGUUGAU G ACCUUUGG | 3504 | CCAAAGGU GGAGGAAACUCC CU UCAAGGACAUCGUCCGGG AUCAACUC | 8574 |
| 2917 | UGACCUUU G GAUCCAAG | 3505 | CUUGGAUC GGAGGAAACUCC CU UCAAGGACAUCGUCCGGG AAAGGUCA | 8575 |
| 2918 | GACCUUUG G AUCCAAGC | 3506 | GCUUGGAU GGAGGAAACUCC CU UCAAGGACAUCGUCCGGG CAAAGGUC | 8576 |
| 2925 | GGAUCCAA G CCAUAUGA | 2488 | UCAUAUGG GGAGGAAACUCC CU UCAAGGACAUCGUCCGGG UUGGAUCC | 8577 |
| 2932 | AGCCAUAU G ACGGAAUC | 3507 | GAUUCCGU GGAGGAAACUCC CU UCAAGGACAUCGUCCGGG AUAUGGCU | 8578 |
| 2935 | CAUAUGAC G GAAUCCCU | 3508 | AGGGAUUC GGAGGAAACUCC CU UCAAGGACAUCGUCCGGG GUCAUAUG | 8579 |
| 2936 | AUAUGACG G AAUCCCUG | 3509 | CAGGGAUU GGAGGAAACUCC CU UCAAGGACAUCGUCCGGG CGUCAUAU | 8580 |
| 2944 | GAAUCCCU G CCAGCGAG | 2489 | CUCGCUGG GGAGGAAACUCC CU UCAAGGACAUCGUCCGGG AGGGAUUC | 8581 |
| 2498 | CCCUGCCA G CGAGAUCU | 2490 | AGAUCUCG GGAGGAAACUCC CU UCAAGGACAUCGUCCGGG UGGCAGGG | 8582 |
| 2950 | CUGCCAGC G AGAUCUCC | 3510 | GGAGAUCU GGAGGAAACUCC CU UCAAGGACAUCGUCCGGG GCUGGCAG | 8583 |
| 2952 | GCCAGCGA G AUCUCCUC | 3511 | GAGGAGAU GGAGGAAACUCC CU UCAAGGACAUCGUCCGGG UCGCUGGC | 8584 |
| 2967 | UCCAUCCU G GAGAAAGG | 3512 | CCUUUCUC GGAGGAAACUCC CU UCAAGGACAUCGUCCGGG AGGAUGGA | 8585 |
| 2968 | CCAUCCUG G AGAAAGGA | 3513 | UCCUUUCU GGAGGAAACUCC CU UCAAGGACAUCGUCCGGG CAGGAUGG | 8586 |
| 2970 | AUCCUGGA G AAAGGAGA | 3514 | UCUCCUUU GGAGGAAACUCC CU UCAAGGACAUCGUCCGGG UCCAGGAU | 8587 |
| 2974 | UGGAGAAA G GAGAACGC | 3515 | GCGUUCUC GGAGGAAACUCC CU UCAAGGACAUCGUCCGGG UUUCUCCA | 8588 |
| 2975 | GGAGAAAG G AGAACGCC | 3516 | GGCGUUCU GGAGGAAACUCC CU UCAAGGACAUCGUCCGGG CUUUCUCC | 8589 |
| 2977 | AGAAAGGA G AACGCCUC | 3517 | GAGGCGUU GGAGGAAACUCC CU UCAAGGACAUCGUCCGGG UCCUUUCU | 8590 |
| 2981 | AGGAGAAC G CCUCCCUC | 2491 | GAGGGAGG GGAGGAAACUCC CU UCAAGGACAUCGUCCGGG GUUCUCCU | 8591 |
| 2991 | CUCCCUCA G CCACCCAU | 2492 | AUGGGUGG GGAGGAAACUCC CU UCAAGGACAUCGUCCGGG UGAGGGAG | 8592 |
| 3002 | ACCCAUAU G UACCAUCG | 2493 | CGAUGGUA GGAGGAAACUCC CU UCAAGGACAUCGUCCGGG AUAUGGGU | 8593 |
| 3010 | GUACCAUC G AUGUCUAC | 3518 | GUAGACAU GGAGGAAACUCC CU UCAAGGACAUCGUCCGGG GAUGGUAC | 8594 |
| 3013 | CCAUCGAU G UCUACAUG | 2494 | CAUGUAGA GGAGGAAACUCC CU UCAAGGACAUCGUCCGGG AUCGAUGG | 8595 |
| 3021 | GUCUACAU G AUCAUGGU | 3519 | ACCAUGAU GGAGGAAACUCC CU UCAAGGACAUCGUCCGGG AUGUAGAC | 8596 |
| 3027 | AUGAUCAU G GUCAAGUG | 3520 | CACUUGAC GGAGGAAACUCC CU UCAAGGACAUCGUCCGGG AUGAUCAU | 8597 |
| 3028 | UGAUCAUG G UCAAGUGC | 2495 | GCACUUGA GGAGGAAACUCC CU UCAAGGACAUCGUCCGGG CAUGAUCA | 8598 |
| 3033 | AUGGUCAA G UGCUGGAU | 2496 | AUCCAGCA GGAGGAAACUCC CU UCAAGGACAUCGUCCGGG UUGACCAU | 8599 |
| 3035 | GGUCAAGU G CUGGAUGA | 2497 | UCAUCCAG GGAGGAAACUCC CU UCAAGGACAUCGUCCGGG ACUUGACC | 8600 |
| 3038 | CAAGUGCU G GAUGAUAG | 3521 | CUAUCAUC GGAGGAAACUCC CU UCAAGGACAUCGUCCGGG AGCACUUG | 8601 |
| 3039 | AAGUGCUG G AUGAUAGA | 3522 | UCUAUCAU GGAGGAAACUCC CU UCAAGGACAUCGUCCGGG CAGCACUU | 8602 |
| 3042 | UGCUGGAU G AUAGACGC | 3523 | GCGUCUAU GGAGGAAACUCC CU UCAAGGACAUCGUCCGGG AUCCAGCA | 8603 |
| 3046 | GGAUGAUA G ACGCAGAU | 3524 | AUCUGCGU GGAGGAAACUCC CU UCAAGGACAUCGUCCGGG UAUCAUCC | 8604 |
| 3049 | UGAUAGAC G CAGAUAGU | 2498 | ACUAUCUG GGAGGAAACUCC CU UCAAGGACAUCGUCCGGG GUCUAUCA | 8605 |
| 3052 | UAGACGCA G AUAGUCGC | 3525 | GCGACUAU GGAGGAAACUCC CU UCAAGGACAUCGUCCGGG UGCGUCUA | 8606 |
| 3056 | CGCAGAUA G UCGCCCAA | 2499 | UUGGGCGA GGAGGAAACUCC CU UCAAGGACAUCGUCCGGG UAUCUGCG | 8607 |
| 3059 | AGAUAGUC G CCCAAAGU | 2500 | ACUUUGGG GGAGGAAACUCC CU UCAAGGACAUCGUCCGGG GACUAUCU | 8608 |
| 3066 | CGCCCAAA G UUCCGUGA | 2501 | UCACGGAA GGAGGAAACUCC CU UCAAGGACAUCGUCCGGG UUUGGGCG | 8609 |
| 3071 | AAAGUUCC G UGAGUUGA | 2502 | UCAACUCA GGAGGAAACUCC CU UCAAGGACAUCGUCCGGG GGAACUUU | 8610 |
| 3073 | AGUUCCGU G AGUUGAUC | 3526 | GAUCAACU GGAGGAAACUCC CU UCAAGGACAUCGUCCGGG ACGGAACU | 8511 |
| 3075 | UUCCGUGA G UUGAUCAU | 2503 | AUGAUCAA GGAGGAAACUCC CU UCAAGGACAUCGUCCGGG UCACGGAA | 8612 |
| 3078 | CGUGAGUU G AUCAUCGA | 3527 | UCGAUGAU GGAGGAAACUCC CU UCAAGGACAUCGUCCGGG AACUCACG | 8613 |
| 3085 | UGAUCAUC G AAUUCUCC | 3528 | GGAGAAUU GGAGGAAACUCC CU UCAAGGACAUCGUCCGGG GAUGAUCA | 8614 |
| 3099 | UCCAAAAU G GCCCGAGA | 3529 | UCUCGGGC GGAGGAAACUCC CU UCAAGGACAUCGUCCGGG AUUUUGGA | 8615 |
| 3100 | CCAAAAUG G CCCGAGAC | 2504 | GUGUCGGG GGAGAAACUCCC CU UCAAGGACAUCGUCCGGG CAUUUUGG | 8616 |
| 3104 | AAUGGCCC G AGACCCCC | 3530 | GGGGGUCU GGAGGAAACUCC CU UCAAGGACAUCGUCCGGG GGGCCAUU | 8617 |
| 3106 | UGGCCCGA G ACCCCCAG | 3531 | CUGGGGGU GGAGAAACUCCC CU UCAAGGACAUCGUCCGGG UCGGGCCA | 8618 |
| 3114 | CACCCCCA G CGCUACCU | 2505 | AGGUAGCG GGAGGAAACUCC CU UCAAGGACAUCGUCCGGG UGGGGGUC | 8619 |
| 3116 | CCCCCAGC G CUACCUUG | 2504 | CAAGGUAG GGAGAAACUCCC CU UCAAGGACAUCGUCCGGG GCUGGGGG | 8620 |
| 3124 | GCUACCUC G UCAUUCAG | 2507 | CUGAAUGA GGAGGAAACUCC CU UCAAGGACAUCGUCCGGG AAGGUAGC | 8621 |
| 3132 | GUCAUUCA G GGGGAUGA | 3532 | UCAUCCCC GGAGAAACUCCC CU UCAAGGACAUCGUCCGGG UGAAUGAC | 8622 |
| 3133 | UCAUUCAG G GGGAUGAA | 3533 | UUCAUCCC GGAGGAAACUCC CU UCAAGGACAUCGUCCGGG CUGAAUGA | 8623 |
| 3134 | CAUUCAGG G GGAUGAAA | 3534 | UUUCAUCC GGAGGAAACUCC CU UCAAGGACAUCGUCCGGG CCUGAAUG | 8624 |
| 3135 | AUUCAGGG G GAUGAAAG | 3535 | CUUUCAUC GGAGGAAACUCC CU UCAAGGACAUCGUCCGGG CCCUGAAU | 8625 |
| 3136 | UUCAGGGG G AUGAAAGA | 3536 | UCUUUCAU GGAGGAAACUCC CU UCAAGGACAUCGUCCGGG CCCCUGAA | 8626 |
| 3139 | AGGGGGAU G AAAGAAUG | 3537 | CAUUCUUU GGAGGAAACUCC CU UCAAGGACAUCGUCCGGG AUCCCCCU | 8627 |
| 3143 | GGAUGAAA G AAUGCAUU | 3538 | AAUGCAUU GGAGGAAACUCC CU UCAAGGACAUCGUCCGGG UUUCAUCC | 8628 |
| 3147 | GAAAGAAU G CAUUUGCC | 2508 | GGCAAAUG GGAGGAAACUCC CU UCAAGGACAUCGUCCGGG AUUCUUUC | 8629 |
| 3153 | AUGCAUUU G CCAAGUCC | 2509 | GGACUUGG GGAGGAAACUCC CU UCAAGGACAUCGUCCGGG AAAUGCAU | 8630 |
| 3158 | UUUGCCAA G UCCUACAG | 2510 | CUGUAGGA GGAGGAAACUCC CU UCAAGGACAUCGUCCGGG UUGGCAAA | 8631 |
| 3166 | GUCCUACA G ACUCCAAC | 3539 | GUUGGAGU GGAGGAAACUCC CU UCAAGGACAUCGUCCGGG UGUAGGAC | 8632 |
| 3182 | CUUCUACC G UGCCCUGA | 2511 | UCAGGGCA GGAGGAAACUCC CU UCAAGGACAUCGUCCGGG GGUAGAAG | 8633 |
| 3184 | UCUACCGU G CCCUGAUG | 2512 | CAUCAGGG GGAGGAAACUCC CU UCAAGGACAUCGUCCGGG ACGGUAGA | 8634 |
| 3189 | CGUGCCCU G AUGGAUGA | 3540 | UCAUCCAU GGAGGAAACUCC CU UCAAGGACAUCGUCCGGG AGGGCACG | 8635 |
| 3192 | GCCCUGAU G GAUGAAGA | 3541 | UCUUCAUC GGAGGAAACUCC CU UCAAGGACAUCGUCCGGG AUCAGGGC | 8636 |
| 3193 | CCCUGAUG G AUGAAGAA | 3542 | UUCUUCAU GGAGGAAACUCC CU UCAAGGACAUCGUCCGGG CAUCAGGG | 8637 |
| 3196 | UGAUGGAU G AAGAAGAC | 3543 | GUCUUCUU GGAGGAAACUCC CU UCAAGGACAUCGUCCGGG AUCCAUCA | 8638 |
| 3199 | UGGAUGAA G AAGACAUG | 3544 | CAUGUCUU GGAGGAAACUCC CU UCAAGGACAUCGUCCGGG UUCAUCCA | 8639 |
| 3202 | AUGAAGAA G ACAUGGAC | 3545 | GUCCAUGU GGAGGAAACUCC CU UCAAGGACAUCGUCCGGG UUCUUCAU | 8640 |
| 3207 | GAAGACAU G GACGACGU | 3546 | ACGUCGUC GGAGGAAACUCC CU UCAAGGACAUCGUCCGGG AUGUCUUC | 8641 |
| 3208 | AAGACAUG G ACGACGUG | 3547 | CACGUCGU GGAGGAAACUCC CU UCAAGGACAUCGUCCGGG CAUGUCUU | 8642 |
| 3211 | ACAUGGAC G ACGUGGUG | 3548 | CACCACGU GGAGGAAACUCC CU UCAAGGACAUCGUCCGGG GUCCAUGU | 8643 |
| 3214 | UGGACGAC G UGGUGGAU | 2513 | AUCCACCA GGAGGAAACUCC CU UCAAGGACAUCGUCCGGG GUCGUCCA | 8644 |
| 3216 | GACGACGU G GUGGAUGC | 3549 | GCAUCCAC GGAGGAAACUCC CU UCAAGGACAUCGUCCGGG ACGUCGUC | 8645 |
| 3217 | ACGACGUG G UGGAUGCC | 2514 | GGCAUCCA GGAGGAAACUCC CU UCAAGGACAUCGUCCGGG CACGUCGU | 8646 |
| 3219 | GACGUGGU G GAUGCCGA | 3550 | UCGGCAUC GGAGGAAACUCC CU UCAAGGACAUCGUCCGGG ACCACGUC | 8647 |
| 3220 | ACGUGGUG G AUGCCGAC | 3551 | GUCGGCAU GGAGGAAACUCC CU UCAAGGACAUCGUCCGGG CACCACGU | 8648 |
| 3223 | UGGUGGAU G CCGACGAG | 2515 | CUCGUCGG GGAGGAAACUCC CU UCAAGGACAUCGUCCGGG AUCCACCA | 8649 |
| 3226 | UGGAUGCC G ACGAGUAC | 3552 | GUACUCGU GGAGGAAACUCC CU UCAAGGACAUCGUCCGGG GGCAUCCA | 8650 |
| 3229 | AUGCCGAC G AGUACCUC | 3553 | GAGGUACU GGAGGAAACUCC CU UCAAGGACAUCGUCCGGG GUCGGCAU | 8651 |
| 3231 | GCCGACGA G UACCUCAU | 3548 | AUGAGGUA GGAGGAAACUCC CU UCAAGGACAUCGUCCGGG UCGUCGGC | 8652 |
| 3246 | AUCCCACA G CAGGGCUU | 2517 | AAGCCCUG GGAGGAAACUCC CU UCAAGGACAUCGUCCGGG UGUGGGAU | 8653 |
| 3249 | CCACAGCA G GGCUUCUU | 3554 | AAGAAGCC GGAGGAAACUCC CU UCAAGGACAUCGUCCGGG UGCUGUGG | 8654 |
| 3250 | CACAGCAG G GCUUCUUC | 3555 | GAAGAAGC GGAGGAAACUCC CU UCAAGGACAUCGUCCGGG CUGCUGUG | 8655 |
| 3251 | ACAGCAGG G CUUCUUCA | 2518 | UGAAGAAG GGAGGAAACUCC CU UCAAGGACAUCGUCCGGG CCUGCUGU | 8656 |
| 3260 | CUUCUUCA G CAGCCCCU | 2519 | AGGGGCUG GGAGGAAACUCC CU UCAAGGACAUCGUCCGGG UGAAGAAG | 8657 |
| 3263 | CUUCAGCA G CCCCUCCA | 2520 | UGGAGGGG GGAGGAAACUCC CU UCAAGGACAUCGUCCGGG UGCUGAAG | 8658 |
| 3273 | CCCUCCAC G UCACGGAC | 2521 | GUCCGUGA GGAGGAAACUCC CU UCAAGGACAUCGUCCGGG GUGGAGGG | 8659 |
| 3278 | CACGUCAC G GACUCCCC | 3553 | GGGGAGUC GGAGGAAACUCC CU UCAAGGACAUCGUCCGGG GUGACGUG | 8660 |
| 3279 | ACGUCACG G ACUCCCCU | 3557 | AGGGGAGU GGAGGAAACUCC CU UCAAGGACAUCGUCCGGG CGUGACGU | 8661 |
| 3291 | CCCCUCCU G AGCUCUCU | 3558 | AGAGAGCU GGAGGAAACUCC CU UCAAGGACAUCGUCCGGG AGGAGGGG | 8662 |
| 3293 | CCUCCUGA G CUCUCUGA | 2522 | UCAGAGAG GGAGGAAACUCC CU UCAAGGACAUCGUCCGGG UCAGGAGG | 8663 |
| 3300 | AGCUCUCU G AGUGCAAC | 3559 | GUUGCACU GGAGGAAACUCC CU UCAAGGACAUCGUCCGGG AGAGAGCU | 8664 |
| 3302 | CUCUCUGA G UGCAACCA | 2523 | UGGUUGCA GGAGGAAACUCC CU UCAAGGACAUCGUCCGGG UCAGAGAG | 8665 |
| 3304 | CUCUGAGU G CAACCAGC | 2524 | GCUGGUUG GGAGGAAACUCC CU UCAAGGACAUCGUCCGGG ACUCAGAG | 8666 |
| 3311 | UGCAACCA G CAACAAUU | 2525 | AAUUGUUG GGAGGAAACUCC CU UCAAGGACAUCGUCCGGG UGGUUGCA | 8667 |
| 3325 | AUUCCACC G UGGCUUGC | 2526 | GCAAGCCA GGAGGAAACUCC CU UCAAGGACAUCGUCCGGG GGUGGAAU | 8668 |
| 3327 | UCCACCGU G GCUUGCAU | 3560 | AUGCAAGC GGAGGAAACUCC CU UCAAGGACAUCGUCCGGG ACGGUGGA | 8669 |
| 3328 | CCACCGUG G CUUGCAUU | 2527 | AAUGCAAG GGAGGAAACUCC CU UCAAGGACAUCGUCCGGG CACGGUGG | 8670 |
| 3332 | CGUGGCUU G CAUUGAUA | 2528 | UAUCAAUG GGAGGAAACUCC CU UCAAGGACAUCGUCCGGG AAGCCACG | 8671 |
| 3337 | CUUGCAUU G AUAGAAAU | 3561 | AUUUCUAU GGAGGAAACUCC CU UCAAGGACAUCGUCCGGG AAUGCAAG | 8672 |
| 3341 | CAUUGAUA G AAAUGGGC | 3562 | GCCCAUUU GGAGGAAACUCC CU UCAAGGACAUCGUCCGGG UAUCAAUG | 8673 |
| 3346 | AUAGAAAU G GGCUGCAA | 3563 | UUGCAGCC GGAGGAAACUCC CU UCAAGGACAUCGUCCGGG AUUUCCAU | 8674 |
| 3347 | UAGAAAUG G GCUGCAAA | 3564 | UUUGCAGC GGAGGAAACUCC CU UCAAGGACAUCGUCCGGG CAUUUCUA | 8675 |
| 3348 | AGAAAUGG G CUGCAAAG | 2529 | CUUUGCAG GGAGGAAACUCC CU UCAAGGACAUCGUCCGGG CCAUUUCU | 8676 |
| 3351 | AAUGGGCU G CAAAGCUG | 2530 | CAGCUUUG GGAGGAAACUCC CU UCAAGGACAUCGUCCGGG AGCCCAUU | 8677 |
| 3356 | GCUGCAAA G CUGUCCCA | 2531 | UGGGACAG GGAGGAAACUCC CU UCAAGGACAUCGUCCGGG UUUGCAGC | 8678 |
| 3359 | GCAAAGCU G UCCCAUCA | 2532 | UGAUGGGA GGAGGAAACUCC CU UCAAGGACAUCGUCCGGG AGCUUUGC | 8679 |
| 3369 | CCCAUCAA G GAAGACAG | 3565 | CUGUCUUC GGAGGAAACUCC CU UCAAGGACAUCGUCCGGG UUGAUGGG | 8680 |
| 3370 | CCAUCAAG G AAGACAGC | 3566 | GCUGUCUU GGAGGAAACUCC CU UCAAGGACAUCGUCCGGG CUUGAUGG | 8681 |
| 3373 | UCAAGGAA G ACAGCUUC | 3567 | GAAGCUGU GGAGGAAACUCC CU UCAAGGACAUCGUCCGGG UUCCUUGA | 8682 |
| 3377 | GGAAGACA G CUUCUUGC | 2533 | GCAAGAAG GGAGGAAACUCC CU UCAAGGACAUCGUCCGGG UGUCUUCC | 8683 |
| 3384 | AGCUUCUU G CAGCGAUA | 2534 | UAUCGCUG GGAGGAAACUCC CU UCAAGGACAUCGUCCGGG AAGAAGCU | 8684 |
| 3387 | UUCUUGCA G CGAUACAG | 2535 | CUGUAUCG GGAGGAAACUCC CU UCAAGGACAUCGUCCGGG UGCAAGAA | 8686 |
| 3389 | CUUGCAGC G AUACAGCU | 3568 | AGCUGUAU GGAGGAAACUCC CU UCAAGGACAUCGUCCGGG GCUGCAAG | 8686 |
| 3395 | GCGAUACA G CUCAGACC | 2536 | GGUCUGAG GGAGGAAACUCC CU UCAAGGACAUCGUCCGGG UGUAUCGC | 8687 |
| 3400 | ACAGCUCA G ACCCCACA | 3569 | UGUGGGGU GGAGGAAACUCC CU UCAAGGACAUCGUCCGGG UGAGCUGU | 8688 |
| 3409 | ACCCCACA G GCGCCUUG | 3570 | CAAGGCGC GGAGGAAACUCC CU UCAAGGACAUCGUCCGGG UGUGGGGU | 8689 |
| 3410 | CCCCACAG G CGCCUUGA | 2537 | UCAAGGCG GGAGGAAACUCC CU UCAAGGACAUCGUCCGGG CUGUGGGG | 8690 |
| 3412 | CCACAGGC G CCUUGACU | 2538 | AGUCAAGG GGAGGAAACUCC CU UCAAGGACAUCGUCCGGG GCCUGUGG | 8691 |
| 3417 | GGCGCCUU G ACUGAGGA | 3571 | UCCUCAGU GGAGGAAACUCC CU UCAAGGACAUCGUCCGGG AAGGCGCC | 8692 |
| 3421 | CCUUGACU G AGGACAGC | 3572 | GCUGUCCU GGAGGAAACUCC CU UCAAGGACAUCGUCCGGG AGUCAAGG | 8693 |
| 3423 | UUGACUGA G GACAGCAU | 3573 | AUGCUGUC GGAGGAAACUCC CU UCAAGGACAUCGUCCGGG UCAGUCAA | 8694 |
| 3424 | UGACUGAG G ACAGCAUA | 3574 | UAUGCUGU GGAGGAAACUCC CU UCAAGGACAUCGUCCGGG CUCAGUCA | 8695 |
| 3428 | UGAGGACA G CAUAGACG | 2539 | CGUCUAUG GGAGGAAACUCC CU UCAAGGACAUCGUCCGGG UGUCCUCA | 8696 |
| 3433 | ACAGCAUA G ACGACACC | 3575 | GGUGUCGU GGAGGAAACUCC CU UCAAGGACAUCGUCCGGG UAUGCUGU | 8697 |
| 3436 | GCAUAGAC G ACACCUUC | 3576 | GAAGGUGU GGAGGAAACUCC CU UCAAGGACAUCGUCCGGG GUCUAUGC | 8698 |
| 3451 | UCCUCCCA G UGCCUGAA | 2540 | UUCAGGCA GGAGGAAACUCC CU UCAAGGACAUCGUCCGGG UGGGAGGA | 8699 |
| 3453 | CUCCCAGU G CCUGAAUA | 2541 | UAUUCAGG GGAGGAAACUCC CU UCAAGGACAUCGUCCGGG ACUGGGAG | 8700 |
| 3457 | CAGUGCCU G AAUACAUA | 3577 | UAUGUAUU GGAGGAAACUCC CU UCAAGGACAUCGUCCGGG AGGCACUG | 8701 |
| 3471 | AUAAACCA G UCCGUUCC | 2542 | GGAACGGA GGAGGAAACUCC CU UCAAGGACAUCGUCCGGG UGGUUUAU | 8702 |
| 3475 | ACCAGUCC G UUCCCAAA | 2543 | UUUGGGAA GGAGGAAACUCC CU UCAAGGACAUCGUCCGGG GGACUGGU | 8703 |
| 3485 | UCCCAAAA G GCCCGCUG | 3578 | CAGCGGGC GGAGGAAACUCC CU UCAAGGACAUCGUCCGGG UUUUGGGA | 8704 |
| 3486 | CCCAAAAG G CCCGCUGG | 2544 | CCAGCGGG GGAGGAAACUCC CU UCAAGGACAUCGUCCGGG CUUUUGGG | 8705 |
| 3490 | AAAGGCCC G CUGGCUCU | 2545 | AGAGCCAG GGAGGAAACUCC CU UCAAGGACAUCGUCCGGG GGGCCUUU | 8706 |
| 3493 | GGCCCGCU G GCUCUGUG | 3579 | CACAGAGC GGAGGAAACUCC CU UCAAGGACAUCGUCCGGG AGCGGGCC | 8707 |
| 3494 | GCCCGCUG G CUCUGUGC | 2546 | GCACAGAG GGAGGAAACUCC CU UCAAGGACAUCGUCCGGG CAGCGGGC | 8708 |
| 3499 | CUGGCUCU G UGCAGAAU | 2547 | ACUCUCCA GGAGGAAACUCC CU UCAAGGACAUCGUCCGGG AGAGCCAG | 8709 |
| 3501 | GGCUCUGU G CAGAAUCC | 2548 | GGAUUCUG GGAGGAAACUCC CU UCAAGGACAUCGUCCGGG ACAGAGCC | 8710 |
| 3504 | UCUGUGCA G AAUCCUGU | 3580 | ACAGGAUU GGAGGAAACUCC CU UCAAGGACAUCGUCCGGG UGCACAGA | 8711 |
| 3511 | AGAAUCCU G UCUAUCAC | 2549 | GUGAUAGA GGAGGAAACUCC CU UCAAGGACAUCGUCCGGG AGGAUUCU | 8712 |
| 3525 | CACAAUCA G CCUCUGAA | 2550 | UUCAGAGG GGAGGAAACUCC CU UCAAGGACAUCGUCCGGG UGAUUGUG | 8713 |
| 3531 | CAGCCUCU G AACCCCGC | 3581 | GCGGGGUU GGAGGAAACUCC CU UCAAGGACAUCGUCCGGG AGAGGCUG | 8714 |
| 3538 | UGAACCCC G CGCCCAGC | 2551 | GCUGGGCG GGAGGAAACUCC CU UCAAGGACAUCGUCCGGG GGGGUUCA | 8715 |
| 3540 | AACCCCGC G CCCAGCAG | 2552 | CUGCUCGG CGAGGAAACUCC CU UCAAGGACAUCGUCCCGG GCGGGGUU | 8716 |
| 3545 | CGCGCCCA G CAGAGACC | 2553 | GGUCUCUG GGAGGAAACUCC CU UCAAGGACAUCGUCCGGG UGGGCGCG | 8717 |
| 3548 | GCCCACCA G AGACCCAC | 3582 | GUGGGUCU GGAGGAAACUCC CU UCAAGGACAUCGUCCGGG UGCUGGGC | 8718 |
| 3550 | CCAGCACA G ACCCACAC | 3583 | GUGUGGGU GGACGAAACUCC CU UCAAGGACAUCGUCCGGG UCUGCUGG | 8719 |
| 3564 | CACUACCA G GACCCCCA | 3584 | UGGGGGUC GGAGGAAACUCC CU UCAAGGACAUCGUCCGGG UGGUAGUG | 8720 |
| 3565 | ACUACCAG G ACCCCCAC | 3585 | GUGGCCGU GGAGGAAACUCC CU UCAAGGACAUCGUCCCGG CUGGUAGU | 8721 |
| 3575 | CCCCCACA G CACUGCAG | 2554 | CUGCAGUG GGAGGAAACUCC CU UCAAGGACAUCGUCCGGG UGUGGGGG | 8722 |
| 3580 | ACAGCACU G CAGUGGGC | 2555 | GCCCACUG GGAGGAAACUCC CU UCAAGGACAUCGUCCGGG AGUGCUGU | 8723 |
| 3583 | GCACUGCA G UGGGCAAC | 2556 | GUUGCCCA CGAGGAAACUCC CU UCAAGGACAUCGUCCGGG UGCAGUGC | 8724 |
| 3585 | ACUGCAGU G GGCAACCC | 3586 | CGGUUCCC GGAGGAAACUCC CU UCAAGGACAUCGUCCGGG ACUGCAGU | 8725 |
| 3586 | CUGCAGUG G GCAACCCC | 3587 | GGGGUUGC CGAGGAAACUCC CU UCAAGGACAUCGUCCCGG CACUGCAG | 8726 |
| 3587 | UGCAGUGG G CAACCCCG | 2557 | CGGGGUUG GGAGGAAACUCC CU UCAAGGACAUCGUCCGGG CCACUGCA | 8727 |
| 3595 | GCAACCCC G AGUAUCUC | 3588 | GAGAUACU GGAGGAAACUCC CU UCAAGGACAUCGUCCGGG GGGGUUGC | 8728 |
| 3597 | AACCCCGA G UAUCUCAA | 2558 | UUGAGAUA GGACGAAACUCC CU UCAAGGACAUCGUCCGGG UCGGGGUU | 8729 |
| 3610 | UCAACACU G UCCAGCCC | 2559 | GGGCUGGA GGAGGAAACUCC CU UCAAGGACAUCGUCCGGG AGUGUUGA | 8730 |
| 3615 | ACUGUCCA G CCCACCUG | 2560 | CAGGUGGG GGAGGAAACUCC CU UCAAGGACAUCGUCCCGG UGGACAGU | 8731 |
| 3623 | GCCCACCU G UGUCAACA | 2561 | UGUUGACA GGAGGAAACUCC CU UCAAGGACAUCGUCCGGG AGGUGGGC | 8732 |
| 3625 | CCACCUGU G UCAACAGC | 2562 | GCUGUUGA GGAGGAAACUCC CU UCAAGGACAUCGUCCGGG ACAGGUGG | 8733 |
| 3632 | UGUCAACA G CACAUUCG | 2563 | CGAAUGUG GGAGGAAACUCC CU UCAAGGACAUCGUCCGGG UGUUGACA | 8734 |
| 3640 | GCACAUUC G ACAGCCCU | 3589 | AGGGCUGU GGAGGAAACUCC CU UCAAGGACAUCGUCCGGG GAAUGUGC | 8735 |
| 3644 | AUUCGACA G CCCUGCCC | 2564 | GGGCAGGG GGAGGAAACUCC CU UCAAGGACAUCGUCCGGG UGUCGAAU | 8736 |
| 3649 | ACAGCCCU G CCCACUGG | 2565 | CCAGUGGG GGAGGAAACUCC CU UCAAGGACAUCGUCCGGG AGGGCUGU | 8737 |
| 3656 | UGCCCACU G GGCCCAGA | 3590 | UCUGGGCC GGAGGAAACUCC CU UCAAGGACAUCGUCCGGG AGUGGGCA | 8738 |
| 3657 | GCCCACUG G GCCCAGAA | 3591 | UUCUGGGC GGAGGAAACUCC CU UCAAGGACAUCGUCCGGG CAGUGGGC | 8739 |
| 3658 | CCCACUGG G CCCAGAAA | 2566 | UUUCUGGG GGAGGAAACUCC CU UCAAGGACAUCGUCCGGG CCAGUGGG | 8740 |
| 3663 | UGGGCCCA G AAAGGCAG | 3592 | CUGCCUUU GGAGGAAACUCC CU UCAAGGACAUCGUCCGGG UGGGCCCA | 8741 |
| 3667 | CCCAGAAA G GCAGCCAC | 3593 | GUGGCUGC GGAGGAAACUCC CU UCAAGGACAUCGUCCGGG UUUCUGGG | 8742 |
| 3668 | CCAGAAAG G CAGCCACC | 2567 | GGUGGCUG GGAGGAAACUCC CU UCAAGGACAUCGUCCGGG CUUUCUGG | 8743 |
| 3671 | GAAAGGCA G CCACCAAA | 2568 | UUUGGUGG GGAGGAAACUCC CU UCAAGGACAUCGUCCGGG UGCCUUUC | 8744 |
| 3683 | CCAAAUUA G CCUGGACA | 2569 | UGUCCAGG GGAGGAAACUCC CU UCAAGGACAUCGUCCGGG UAAUUUGG | 8745 |
| 3687 | AUUAGCCU G GACAACCC | 3594 | GGGUUGUC GGAGGAAACUCC CU UCAAGGACAUCGUCCGGG AGGCUAAU | 8746 |
| 3688 | UUAGCCUG G ACAACCCU | 3595 | AGGGUUGU GGAGGAAACUCC CU UCAAGGACAUCGUCCGGG CAGGCUAA | 8747 |
| 3697 | ACAACCCU G ACUACCAG | 3596 | CUGGUAGU GGAGGAAACUCC CU UCAAGGACAUCGUCCGGG AGGGUUGU | 8748 |
| 3705 | GACUACCA G CAGGACUU | 2570 | AAGUCCUG GGAGGAAACUCC CU UCAAGGACAUCGUCCGGG UGGUAGUC | 8749 |
| 3708 | UACCAGCA G GACUUCUU | 3597 | AAGAAGUC GGAGGAAACUCC CU UCAAGGACAUCGUCCGGG UGCUGGUA | 8750 |
| 3709 | ACCAGCAG G ACUUCUUU | 3598 | AAAGAAGU GGAGGAAACUCC CU UCAAGGACAUCGUCCGGG CUGCUGGU | 8751 |
| 3723 | UUUCCCAA G GAAGCCAA | 3599 | UUGGCUUC GGAGGAAACUCC CU UCAAGGACAUCGUCCGGG UUGGGAAA | 8752 |
| 3724 | CCAAGGAA G AAGCCAAG | 3600 | CUUGGCUU GGAGGAAACUCC CU UCAAGGACAUCGUCCGGG CUUGGGAA | 8753 |
| 3727 | CCAAGGAA G CCAAGCCA | 2571 | UGGCUUGG GGAGGAAACUCC CU UCAAGGACAUCGUCCGGG UUCCUUGG | 8754 |
| 3732 | GAAGCCAA G CCAAAUGG | 2572 | CCAUUUGG GGAGGAAACUCC CU UCAAGGACAUCGUCCGGG UUGGCUUC | 8755 |
| 3739 | AGCCAAAU G GCAUCUUU | 3601 | AAAGAUGC GGAGGAAACUCC CU UCAAGGACAUCGUCCGGG AUUUGGCU | 8756 |
| 3740 | GCCAAAUG G CAUCUUUA | 2573 | UAAAGAUG GGAGGAAACUCC CU UCAAGGACAUCGUCCGGG CAUUUGGC | 8757 |
| 3750 | AUCUUUAA G GGCUCCAC | 3602 | GUGGAGCC GGAGGAAACUCC CU UCAAGGACAUCGUCCGGG UUAAAGAU | 8758 |
| 3751 | UCUUUAAG G GCUCCACA | 3603 | UGUGGAGC GGAGGAAACUCC CU UCAAGGACAUCGUCCGGG CUUAAAGA | 8759 |
| 3752 | CUUUAAGG G CUCCACAG | 2574 | CUGUGGAG GGAGGAAACUCC CU UCAAGGACAUCGUCCGGG CCUUAAAG | 8760 |
| 3760 | GCUCCACA G CUGAAAAU | 2575 | AUUUUCAG GGAGGAAACUCC CU UCAAGGACAUCGUCCGGG UGUGGAGC | 8761 |
| 3763 | CCACAGCU G AAAAUGCA | 3604 | UGCAUUUU GGAGGAAACUCC CU UCAAGGACAUCGUCCGGG AGCUGUGG | 8762 |
| 3769 | CUGAAAAU G CAGAAUAC | 2576 | GUAUUCUG GGAGGAAACUCC CU UCAAGGACAUCGUCCGGG AUUUUCAG | 8763 |
| 3772 | AAAAUGCA G AAUACCUA | 3605 | UAGGUAUU GGAGGAAACUCC CU UCAAGGACAUCGUCCGGG UGCAUUUU | 8764 |
| 3782 | AUACCUAA G GGUCGCGC | 3606 | GCGCGACC GGAGGAAACUCC CU UCAAGGACAUCGUCCGGG UUAGGUAU | 8765 |
| 3783 | UACCUAAG G GUCGCGCC | 3607 | GGCGCGAC GGAGGAAACUCC CU UCAAGGACAUCGUCCGGG CUUAGGUA | 8766 |
| 3784 | ACCUAAGG G UCGCGCCA | 2577 | UGGCGCGA GGAGGAAACUCC CU UCAAGGACAUCGUCCGGG CCUUAGGU | 8767 |
| 3787 | UAAGGGUC G CGCCACAA | 2578 | UUGUGGCG GGAGGAAACUCC CU UCAAGGACAUCGUCCGGG GACCCUUA | 8768 |
| 3789 | AGGGUCGC G CCACAAAG | 2579 | CUUUGUGG GGAGGAAACUCC CU UCAAGGACAUCGUCCGGG GCGACCCU | 8769 |
| 3797 | GCCACAAA G CAGUGAAU | 2580 | AUUCACUG GGAGGAAACUCC CU UCAAGGACAUCGUCCGGG UUUGUGGC | 8770 |
| 3800 | ACAAAGCA G UGAAUUUA | 2581 | UAAAUUCA GGAGGAAACUCC CU UCAAGGACAUCGUCCGGG UGCUUUGU | 8771 |
| 3802 | AAAGCAGU G AAUUUAUU | 3608 | AAUAAAUU GGAGGAAACUCC CU UCAAGGACAUCGUCCGGG ACUGCUUU | 8772 |
| 3811 | AAUUUAUU G GAGCAUGA | 3609 | UCAUGCUC GGAGGAAACUCC CU UCAAGGACAUCGUCCGGG AAUAAAUU | 8773 |
| 3812 | AUUUAUUG G AGCAUGAC | 3610 | GUCAUGCU GGAGGAAACUCC CU UCAAGGACAUCGUCCGGG CAAUAAAU | 8774 |
| 3814 | UUAUUGGA G CAUGACCA | 2582 | UGGUCAUG GGAGGAAACUCC CU UCAAGGACAUCGUCCGGG UCCAAUAA | 8775 |
| 3818 | UGGAGCAU G ACCACGGA | 3611 | UCCGUGGU GGAGGAAACUCC CU UCAAGGACAUCGUCCGGG AUGCUCCA | 8776 |
| 3824 | AUGACCAC G GAGGAUAG | 3612 | CUAUCCUC GGAGGAAACUCC CU UCAAGGACAUCGUCCGGG GUGGUCAU | 8777 |
| 3825 | UGACCACG G AGGAUAGU | 3613 | ACUAUCCU GGAGGAAACUCC CU UCAAGGACAUCGUCCGGG CGUGGUCA | 8778 |
| 3827 | ACCACGGA G GAUAGUAU | 3614 | AUACUAUC GGAGGAAACUCC CU UCAAGGACAUCGUCCGGG UCCGUGGU | 8779 |
| 3828 | CCACGGAG G AUAGUAUG | 3615 | CAUACUAU GGAGGAAACUCC CU UCAAGGACAUCGUCCGGG CUCCGUGG | 8780 |
| 3832 | GGAGGAUA G UAUGAGCC | 2583 | GGCUCAUA GGAGGAAACUCC CU UCAAGGACAUCGUCCGGG UAUCCUCC | 8781 |
| 3836 | GAUAGUAU G AGCCCUAA | 3616 | UUAGGGCU GGAGGAAACUCC CU UCAAGGACAUCGUCCGGG AUACUAUC | 8782 |
| 3838 | UAGUAUGA G CCCUAAAA | 2584 | UUUUAGGG GGAGGAAACUCC CU UCAAGGACAUCGUCCGGG UCAUACUA | 8783 |
| 3852 | AAAAUCCA G ACUCUUUC | 3617 | GAAAGAGU GGAGGAAACUCC CU UCAAGGACAUCGUCCGGG UGGAUUUU | 8784 |
| 3861 | ACUCUUUC G AUACCCAG | 3618 | CUGGGUAU GGAGGAAACUCC CU UCAAGGACAUCGUCCGGG GAAAGAGU | 8785 |
| 3869 | GAUACCCA G GACCAAGC | 3619 | GCUUGGUC GGAGGAAACUCC CU UCAAGGACAUCGUCCGGG UGGGUAUC | 8786 |
| 3870 | AUACCCAG G ACCAAGCC | 3620 | GGCUUGGU GGAGGAAACUCC CU UCAAGGACAUCGUCCGGG CUGGGUAU | 8787 |
| 3876 | AGGACCAA G CCACAGCA | 2585 | UGCUGUGG GGAGGAAACUCC CU UCAAGGACAUCGUCCGGG UUGGUCCU | 8788 |
| 3882 | AAGCCACA G CAGGUCCU | 2586 | AGGACCUG GGAGGAAACUCC CU UCAAGGACAUCGUCCGGG UGUGGCUU | 8789 |
| 3885 | CCACAGCA G GUCCUCCA | 3621 | UGGAGGAC GGAGGAAACUCC CU UCAAGGACAUCGUCCGGG UGCUGUGG | 8790 |
| 3886 | CACAGCAG G UCCUCCAU | 2587 | AUGGAGGA GGAGGAAACUCC CU UCAAGGACAUCGUCCGGG CUGCUGUG | 8791 |
| 3902 | UCCCAACA G CCAUGCCC | 2588 | GGGCAUGG GGAGGAAACUCC CU UCAAGGACAUCGUCCGGG UGUUGGGA | 8792 |
| 3907 | ACAGCCAU G CCCGCAUU | 2588 | AAUGCGGG GGAGGAAACUCC CU UCAAGGACAUCGUCCGGG AUGGCUGU | 8793 |
| 3911 | CCAUGCCC G CAUUAGCU | 2590 | AGCUAAUG GGAGGAAACUCC CU UCAAGGACAUCGUCCGGG GGGCAUGG | 8794 |
| 3917 | CCGCAUUA G CUCUUAGA | 2591 | UCUAAGAG GGAGGAAACUCC CU UCAAGGACAUCGUCCGGG UAAUGCGG | 8795 |
| 3924 | AGCUCUUA G ACCCACAG | 3622 | CUGUGGGU GGAGGAAACUCC CU UCAAGGACAUCGUCCGGG UAAGAGCU | 8796 |
| 3932 | GACCCACA G ACUGGUUU | 3623 | AAACCAGU GGAGGAAACUCC CU UCAAGGACAUCGUCCGGG UGUGGGUC | 8797 |
| 3936 | CACAGACU G GUUUUGCA | 3624 | UGCAAAAC GGAGGAAACUCC CU UCAAGGACAUCGUCCGGG AGUCUGUG | 8798 |
| 3937 | ACAGACUG G UUUUGCAA | 2592 | UUGCAAAA GGAGGAAACUCC CU UCAAGGACAUCGUCCGGG CAGUCUGU | 8799 |
| 3942 | CUGGUUUU G CAACGUUU | 2593 | AAACGUUG GGAGGAAACUCC CU UCAAGGACAUCGUCCGGG AAAACCAG | 8800 |
| 3947 | UUUGCAAC G UUUACACC | 2594 | GGUGUAAA GGAGGAAACUCC CU UCAAGGACAUCGUCCGGG GUUGCAAA | 8801 |
| 3956 | UUUACACC G ACUAGCCA | 3624 | UGGCUAGU GGAGGAAACUCC CU UCAAGGACAUCGUCCGGG GGUGUAAA | 8802 |
| 3961 | ACCGACUA G CCAGGAAG | 2595 | CUUCCUGG GGAGGAAACUCC CU UCAAGGACAUCGUCCGGG UAGUCGGU | 8803 |
| 3965 | ACUAGCCA G GAAGUACU | 3926 | AGUACUUC GGAGGAAACUCC CU UCAAGGACAUCGUCCGGG UGGCUAGU | 8804 |
| 3966 | CUAGCCAG G AAGUACUU | 3627 | AAGUACUU GGAGGAAACUCC CU UCAAGGACAUCGUCCGGG CUGGCUAG | 8805 |
| 3969 | GCCAGGAA G UACUUCCA | 2596 | UGGAAGUA GGAGGAAACUCC CU UCAAGGACAUCGUCCGGG UUCCUGGC | 8806 |
| 3982 | UCCACCUC G GGCACAUU | 3628 | AAUGUGCC GGAGGAAACUCC CU UCAAGGACAUCGUCCGGG GAGGUGGA | 8807 |
| 3983 | CCACCUCG G GCACAUUU | 3629 | AAAUGUGC GGAGGAAACUCC CU UCAAGGACAUCGUCCGGG CGAGGUGG | 8808 |
| 3984 | CACCUCGG G CACAUUUU | 2597 | AAAAUGUG GGAGGAAACUCC CU UCAAGGACAUCGUCCGGG CCGAGGUG | 8809 |
| 3993 | CACAUUUU G GGAAGUUG | 3630 | CAACUUCC GGAGGAAACUCC CU UCAAGGACAUCGUCCGGG AAAAUGUG | 8810 |
| 3994 | ACAUUUUG G GAAGUUGC | 3631 | GCAACUUC GCAGGAAACUCC CU UCAAGGACAUCGUCCGGG CAAAAUGU | 8811 |
| 3995 | CAUUUUGG G AAGUUGCA | 3632 | UGCAACUU GGAGGAAACUCC CU UCAAGGACAUCGUCCGGG CCAAAAUG | 8812 |
| 3998 | UUUGGGAA G UUGCAUUC | 2598 | GAAUGCAA GGAGGAAACUCC CU UCAAGGACAUCGUCCGGG UUCCCAAA | 8813 |
| 4001 | GCGAAGUU G CAUUCCUU | 2599 | AACGAAUG CGAGGAAACUCC CU UCAAGGACAUCGUCCGGG AACUUCCC | 8814 |
| 4011 | AUUCCUUU G UCUUCAAA | 2600 | UUUGAAGA GGAGGAAACUCC CU UCAACGACAUCGUCCGGG AAAGGAAU | 8815 |
| 4022 | UUCAAACU G UGAAGCAU | 2601 | AUGCUUCA GGAGGAAACUCC CU UCAAGGACAUCGUCCGGG AGUUUGAA | 8816 |
| 4024 | CAAACUGU G AAGCAUUU | 3633 | AAAUCCUU GCAGGAAACUCC CU UCAAGGACAUCGUCCGGG ACAGUUUG | 8817 |
| 4027 | ACUCUCAA G CAUUUACA | 2602 | UCUAAAUC CCAGGAAACUCC CU UCAAGGACAUCGUCCGGG UUCACAGU | 8818 |
| 4036 | CAUUUACA G AAACGCAU | 3634 | AUCCCUUU GGAGGAAACUCC CU UCAAGGACAUCGUCCGGG UGUAAAUG | 8819 |
| 4041 | ACAGAAAC G CAUCCAGC | 2603 | GCUCCAUG GCAGGAAACUCC CU UCAAGGACAUCGUCCGGG GUUUCUGU | 8820 |
| 4048 | CGCAUCCA G CAACAAUA | 2604 | UAUUCUUG GGAGGAAACUCC CU UCAAGGACAUCGUCCGGG UGGAUGCG | 8821 |
| 4052 | UCCAGCAA G AAUAUUGU | 3635 | ACAAUAUU GCAGGAAACUCC CU UCAAGCACAUCGUCCGGG UUGCUGGA | 8822 |
| 4059 | AGAAUAUU G UCCCUUUG | 2605 | CAAAGGGA CCAGGAAACUCC CU UCAAGGACAUCGUCCGGG AAUAUUCU | 8823 |
| 4067 | GUCCCUUU G AGCAGAAA | 3636 | UUUCUGCU GGAGGAAACUCC CU UCAAGGACAUCGUCCGGG AAAGGGAC | 8824 |
| 4069 | CCCUUUGA G CAGAAAUU | 2606 | AAUUUCUG GGAGGAAACUCC CU UCAAGGACAUCGUCCGGG UCAAAGGG | 8825 |
| 4072 | UUUGAGCA G AAAUUUAU | 3637 | AUAAAUUU GGAGGAAACUCC CU UCAAGGACAUCGUCCGGG UGCUCAAA | 8826 |
| 4089 | CUUUCAAA G AGGUAUAU | 3638 | AUAUACCU GGAGGAAACUCC CU UCAAGGACAUCGUCCGGG UUUGAAAG | 8827 |
| 4091 | UUCAAAGA G GUAUAUUU | 3639 | AAAUAUAC GGAGGAAACUCC CU UCAAGGACAUCGUCCGGG UCUUUGAA | 8828 |
| 4092 | UCAAAGAG G UAUAUUUG | 2607 | CAAAUAUA GGAGGAAACUCC CU UCAAGGACAUCGUCCGGG CUCUUUGA | 8829 |
| 4100 | GUAUAUUU G AAAAAAAA | 3640 | UUUUUUUU GGAGGAAACUCC CU UCAAGGACAUCGUCCGCG AAAUAUAC | 8830 |
| 4116 | AAAAAAAA G UAUAUGUG | 2608 | CACAUAUA GGAGGAAACUCC CU UCAAGGACAUCGUCCGGG UUUUUUUU | 8831 |
| 4122 | AACUAUAU G UGAGGAUU | 2609 | AAUCCUCA GGAGGAAACUCC CU UCAAGGACAUCGUCCGGG AUAUACUU | 8832 |
| 4124 | GUAUAUGU G AGGAUUUU | 3641 | AAAAUCCU GGAGGAAACUCC CU UCAAGGACAUCGUCCGGG ACAUAUAC | 8833 |
| 4126 | AUAUGUGA G GAUUUUUA | 3642 | UAAAAAUC GGAGGAAACUCC CU UCAAGGACAUCGUCCGGG UCACAUAU | 8834 |
| 4127 | UAUGUGAG G AUUUUUAU | 3643 | AUAAAAAU GGAGGAAACUCC CU UCAAGGACAUCGUCCGGG CUCACAUA | 8835 |
| 4137 | UUUUUAUU G AUUGGGGA | 3644 | UCCCCAAU GGAGGAAACUCC CU UCAAGGACAUCGUCCGGG AAUAAAAA | 8836 |
| 4141 | UAUUGAUU G GGGAUCUU | 3645 | AAGAUCCC GGAGGAAACUCC CU UCAAGGACAUCGUCCGGG AAUCAAUA | 8837 |
| 4142 | AUUGAUUG G GGAUCUUG | 3646 | CAAGAUCC GGAGGAAACUCC CU UCAAGGACAUCGUCCGGG CAAUCAAU | 8838 |
| 4143 | UUGAUUGG G GAUCUUGG | 3647 | CCAAGACU GGAGGAAACUCC CU UCAAGGACAUCGUCCGGG CCAAUCAA | 8839 |
| 4144 | UGAUUGGG G AUCUUGGA | 3648 | UCCAAGAU GGAGGAAACUCC CU UCAAGGACAUCGUCCGGG CCCAAUCA | 8840 |
| 4150 | GGGAUCUU G GAGUUUUU | 3649 | AAAAACUC GGAGGAAACUCC CU UCAAGGACAUCGUCCGGG AAGAUCCC | 8841 |
| 4151 | GGAUCUUG G AGUUUUUC | 3650 | GAAAAACU GGAGGAAACUCC CU UCAAGGACAUCGUCCGGG CAAGAUCC | 8842 |
| 4153 | AUCUUGGA G UUUUUCAU | 2610 | AUGAAAAA GGAGGAAACUCC CU UCAAGGACAUCGUCCGGG UCCAAGAU | 8843 |
| 4163 | UUUUCAUU G UCGCUAUU | 2611 | AAUAGCGA GGAGGAAACUCC CU UCAAGGACAUCGUCCGGG AAUGAAAA | 8844 |
| 4166 | UCAUUGUC G CUAUUGAU | 2612 | AUCAAUAG GGAGGAAACUCC CU UCAAGGACAUCGUCCGGG GACAAUGA | 8845 |
| 4172 | UCGCUAUU G AUUUUUAC | 3651 | GUAAAAAU GGAGGAAACUCC CU UCAAGGACAUCGUCCGGG AAUAGCGA | 8846 |
| 4187 | ACUUCAAU G GGCUCUUC | 3652 | GAAGAGCC GGAGGAAACUCC CU UCAAGGACAUCGUCCGGG AUUGAAGU | 8847 |
| 4188 | CUUCAAUG G GCUCUUCC | 3653 | GGAAGAGC GGAGGAAACUCC CU UCAAGGACAUCGUCCGGG CAUUGAAG | 8848 |
| 4189 | UUCAAUGG G CUCUUCCA | 2613 | UGGAAGAG GGAGGAAACUCC CU UCAAGGACAUCGUCCGGG CCAUUGAA | 8849 |
| 4202 | UCCAACAA G GAAGAAGC | 3654 | GCUUCUUC GGAGGAAACUCC CU UCAAGGACAUCGUCCGGG UUGUUGGA | 8850 |
| 4203 | CCAACAAG G AAGAAGCU | 3655 | AGCUUCUU GGAGGAAACUCC CU UCAAGGACAUCGUCCGGG CUUGUUGG | 8851 |
| 4206 | ACAAGGAA G AAGCUUGC | 3656 | GCAAGCUU GGAGGAAACUCC CU UCAAGGACAUCGUCCGGG UUCCUUGU | 8852 |
| 4209 | AGGAAGAA G CUUGCUGG | 2614 | CCAGCAAG GGAGGAAACUCC CU UCAAGGACAUCGUCCGGG UUCUUCCU | 8853 |
| 4213 | AGAAGCUU G CUGGUAGC | 2615 | GCUACCAG GGAGGAAACUCC CU UCAAGGACAUCGUCCGGG AAGCUUCU | 8854 |
| 4216 | AGCUUGCU G GUAGCACU | 3657 | AGUGCUAC GGAGGAAACUCC CU UCAAGGACAUCGUCCGGG AGCAAGCU | 8855 |
| 4217 | GCUUGCUG G UAGCACUU | 2616 | AAGUGCUA GGAGGAAACUCC CU UCAAGGACAUCGUCCGGG CAGCAAGC | 8856 |
| 4220 | UGCUGGUA G CACUUGCU | 2617 | AGCAAGUG GGAGGAAACUCC CU UCAAGGACAUCGUCCGGG UACCAGCA | 8857 |
| 4226 | UAGCACUU G CUACCCUG | 2618 | CAGGGUAG GGAGGAAACUCC CU UCAAGGACAUCGUCCGGG AAGUGCUA | 8858 |
| 4234 | GCUACCCU G AGUUCAUC | 3658 | GAUGAACU GGAGGAAACUCC CU UCAAGGACAUCGUCCGGG AGGGUAGC | 8859 |
| 4236 | UACCCUGA G UUCAUCCA | 2619 | UGGAUGAA GGAGGAAACUCC CU UCAAGGACAUCGUCCGGG UCAGGGUA | 8860 |
| 4245 | UUCAUCCA G GCCCAACU | 3659 | AGUUGGGC GGAGGAAACUCC CU UCAAGGACAUCGUCCGGG UGGAUGAA | 8861 |
| 4246 | UCAUCCAG G CCCAACUG | 2620 | CAGUUGGG GGAGGAAACUCC CU UCAAGGACAUCGUCCGGG CUGGAUGA | 8862 |
| 4254 | GCCCAACU G UGAGCAAG | 2621 | CUUGCUCA GGAGGAAACUCC CU UCAAGGACAUCGUCCGGG AGUUGGGC | 8863 |
| 4256 | CCAACUGU G AGCAAGGA | 3660 | UCCUUGCU GGAGGAAACUCC CU UCAAGGACAUCGUCCGGG ACAGUUGG | 8864 |
| 4258 | AACUGUGA G CAAGGAGC | 2622 | GCUCCUUG GGAGGAAACUCC CU UCAAGGACAUCGUCCGGG UCACAGUU | 8864 |
| 4262 | GUGAGCAA G GAGCACAA | 3661 | UUGUGCUC GGAGGAAACUCC CU UCAAGGACAUCGUCCGGG UUGCUCAC | 8866 |
| 4263 | UGAGCAAG G AGCACAAG | 3662 | CUUGUGCU GGAGGAAACUCC CU UCAAGGACAUCGUCCGGG CUUGCUCA | 8867 |
| 4265 | AGCAAGGA G CACAAGCC | 2623 | GGCUUGUG GGAGGAAACUCC CU UCAAGGACAUCGUCCGGG UCCUUGCU | 8868 |
| 4271 | GAGCACAA G CCACAAGU | 2624 | ACUUGUGG GGAGGAAACUCC CU UCAAGGACAUCGUCCGGG UUGUGCUC | 8869 |
| 4278 | AGCCACAA G UCUUCCAG | 2625 | CUGGAAGA GGAGGAAACUCC CU UCAAGGACAUCGUCCGGG UUGUGGCU | 8870 |
| 4286 | GUCUUCCA G AGGAUGCU | 3663 | AGCAUCCU GGAGGAAACUCC CU UCAAGGACAUCGUCCGGG UGGAAGAC | 8871 |
| 4288 | CUUCCAGA G GAUGCUUG | 3664 | CAAGCAUC GGAGGAAACUCC CU UCAAGGACAUCGUCCGGG UCUGGAAG | 8871 |
| 4289 | UUCCAGAG G AUGCUUGA | 3665 | UCAAGCAU GGAGGAAACUCC CU UCAAGGACAUCGUCCGGG CUCUGGAA | 8873 |
| 4292 | CAGAGGAU G CUUGAUUC | 2926 | GAAUCAAG GGAGGAAACUCC CU UCAAGGACAUCGUCCGGG AUCCUCUG | 8874 |
| 4296 | GCAUGCUU G AUUCCAGU | 3666 | ACUGGAAU GGAGGAAACUCC CU UCAAGGACAUCGUCCGGG AAGCAUCC | 8875 |
| 4303 | UGAUUCCA G UGGUUCUG | 2627 | CAGAACCA GGAGGAAACUCC CU UCAAGGACAUCGUCCGGG UGGAAUCA | 8876 |
| 4305 | AUUCCAGU G GUUCUGCU | 3667 | AGCAGAAC GGAGGAAACUCC CU UCAAGGACAUCGUCCGGG ACUGGAAU | 8877 |
| 4306 | UUCCAGUG G UUCUGCUU | 2628 | AAGCAGAA GGAGGAAACUCC CU UCAAGGACAUCGUCCGGG CACUGGAA | 8878 |
| 4311 | GUGGUUCU G CUUCAAGG | 2629 | CCUUGAAG GGAGGAAACUCC CU UCAAGGACAUCGUCCGGG AGAACCAC | 8879 |
| 4318 | UGCUUCAA G GCUUCCAC | 3668 | GUGGAAGC GGAGGAAACUCC CU UCAAGGACAUCGUCCGGG UUGAAGCA | 8880 |
| 4319 | GCUUCAAG G CUUCCACU | 2360 | AGUGGAAG GGAGGAAACUCC CU UCAAGGACAUCGUCCGGG CUUGAAGC | 8881 |
| 4328 | CUUCCACU G CAAAACAC | 2631 | GUGUUUUG GGAGGAAACUCC CU UCAAGGACAUCGUCCGGG AGUGGAAG | 8882 |
| 4341 | ACACUAAA G AUCCAAGA | 3669 | UCUUGGAU GGAGGAAACUCC CU UCAAGGACAUCGUCCGGG UUUAGUGU | 8883 |
| 4348 | AGAUCCAA G AAGGCCUU | 3670 | AAGGCCUU GGAGGAAACUCC CU UCAAGGACAUCGUCCGGG UUGGAUCU | 8884 |
| 4351 | UCCAAGAA G GCCUUCAU | 3671 | AUGAAGGC GGAGGAAACUCC CU UCAAGGACAUCGUCCGGG UUCUUGGA | 8885 |
| 4352 | CCAAGAAG G CCUUCAUG | 2632 | CAUGAAGG GGAGGAAACUCC CU UCAAGGACAUCGUCCGGG CUUCUUGG | 8886 |
| 4360 | GCCUUCAU G GCCCCAGC | 3672 | GCUGGGGC GGAGGAAACUCC CU UCAAGGACAUCGUCCGGG AUGAAGGC | 8887 |
| 4361 | CCUUCAUG G CCCCAGCA | 2633 | UGCUGGGG GGAGGAAACUCC CU UCAAGGACAUCGUCCGGG CAUGAAGG | 8888 |
| 4367 | UGGCCCCA G CAGGCCGG | 2634 | CCGGCCUG GGAGGAAACUCC CU UCAAGGACAUCGUCCGGG UGGGGCCA | 8889 |
| 4370 | CCCCAGCA G GCCGGAUC | 3673 | GAUCCGGC GGAGGAAACUCC CU UCAAGGACAUCGUCCGGG UGCUGGGG | 8890 |
| 4371 | CCCAGCAG G CCGGAUCG | 2635 | CGAUCCGG GGAGGAAACUCC CU UCAAGGACAUCGUCCGGG CUGCUGGG | 8891 |
| 4374 | AGCAGGCC G GAUCGGUA | 3674 | UACCGAUC GGAGGAAACUCC CU UCAAGGACAUCGUCCGGG GGCCUGCU | 8892 |
| 4375 | GCAGGCCG G AUCGGUAC | 3675 | GUACCGAU GGAGGAAACUCC CU UCAAGGACAUCGUCCGGG CGGCCUGC | 8893 |
| 4379 | GCCGGAUC G GUACUGUA | 3676 | UACAGUAC GGAGGAAACUCC CU UCAAGGACAUCGUCCGGG GAUCCGGC | 8894 |
| 4380 | CCGGAUCG G UACUGUAU | 2636 | AUACAGUA GGAGGAAACUCC CU UCAAGGACAUCGUCCGGG CGAUCCGG | 8895 |
| 4385 | UCGGUACU G UAUCAAGU | 2637 | ACUUGAUA GGAGGAAACUCC CU UCAAGGACAUCGUCCGGG AGUACCGA | 8896 |
| 4392 | UGUAUCAA G UCAUGGCA | 2638 | UGCCAUGA GGAGGAAACUCC CU UCAAGGACAUCGUCCGGG UUGAUACA | 8897 |
| 4397 | CAAGUCAU G GCAGGUAC | 3677 | GUACCUGC GGAGGAAACUCC CU UCAAGGACAUCGUCCGGG AUGACUUG | 8898 |
| 4398 | AAGUCAUG G CAGGUACA | 2639 | UGUACCUG GGAGGAAACUCC CU UCAAGGACAUCGUCCGGG CAUGACUU | 8899 |
| 4401 | UCAUGGCA G GUACAGUA | 3678 | UACUGUAC GGAGGAAACUCC CU UCAAGGACAUCGUCCGGG UGCCAUGA | 8900 |
| 4402 | CAUGGCAG G UACAGUAG | 2640 | CUACUGUA GGAGGAAACUCC CU UCAAGGACAUCGUCCGGG CUGCCAUG | 8901 |
| 4407 | CAGGUACA G UAGGAUAA | 2641 | UUAUCCUA GGAGGAAACUCC CU UCAAGGACAUCGUCCGGG UGUACCUG | 8902 |
| 4410 | GUACAGUA G GAUAAGCC | 3679 | GGCUUAUC GGAGGAAACUCC CU UCAAGGACAUCGUCCGGG UACUGUAC | 8903 |
| 4411 | UACAGUAG G AUAAGCCA | 3680 | UGGCUUAU GGAGGAAACUCC CU UCAAGGACAUCGUCCGGG CUACUGUA | 8904 |
| 4416 | UAGGAUAA G CCACUCUG | 2642 | CAGAGUGG GGAGGAAACUCC CU UCAAGGACAUCGUCCGGG UUAUCCUA | 8905 |
| 4424 | GCCACUCU G UCCCUUCC | 2643 | GGAAGGGA GGAGGAAACUCC CU UCAAGGACAUCCUCCGGG AGGAAGGG | 8906 |
| 4434 | CCCUUCCU G GGCAAAGA | 3681 | UCUUUGCC GGAGGAAACUCC CU UCAAGGACAUCGUCCGGG AGGAAGGG | 8907 |
| 4435 | CCUUCCUG G GCAAAGAA | 3682 | UUCUUUGC GGAGGAAACUCC CU UCAAGGACAUCGUCCGGG CAGGAAGG | 8908 |
| 4436 | CUUCCUGG G CAAAGAAG | 2644 | CUUCUUUG GGAGGAAACUCC CU UCAAGGACAUCGUCCGGG CCAGGAAG | 8909 |
| 4441 | UGGGCAAA G AAGAAACG | 3683 | CGUUUCUU GGAGGAAACUCC CU UCAAGGACAUCGUCCGGG UUUGCCCA | 8910 |
| 4444 | GCAAAGAA G AAACGGAG | 3684 | CUCCGUUU GGAGGAAACUCC CU UCAAGGACAUCGUCCGGG UUCUUUGC | 8911 |
| 4419 | GAAGAAAC G GAGGGGAU | 3685 | AUCCCCUC GGAGGAAACUCC CU UCAAGGACAUCGUCCGGG GUUUCUUC | 8912 |
| 4450 | AAGAAACG G AGGGGAUG | 3687 | CAUCCCCU GGAGGAAACUCC CU UCAAGGACAUCGUCCGGG CGUUUCUU | 8913 |
| 4452 | GAAACGGA G GGGAUGAA | 3687 | UUCAUCCC GGAGGAAACUCC CU UCAAGGACAUCGUCCGGG UCCGUUUC | 8914 |
| 4453 | AAACGGAG G GGAUGAAU | 3688 | AUUCAUCC GGAGGAAACUCC CU UCAAGGACAUCGUCCGGG CUCCGUUU | 8915 |
| 4454 | AACGGAGG G GAUGAAUU | 3689 | AAUUCAUC GGAGGAAACUCC CU UCAAGGACAUCGUCCGGG CCUCCGUU | 8916 |
| 4455 | ACGGAGGG G AUGAAUUC | 3690 | GAAUUCAU GGAGGAAACUCC CU UCAAGGACAUCGUCCGGG CCCUCCGU | 8917 |
| 4458 | GAGGGGAU G AAUUCUUC | 3691 | GAAGAAUU GGAGGAAACUCC CU UCAAGGACAUCGUCCGGG AUCCCCUC | 8918 |
| 4471 | CUUCCUUA G ACUUACUU | 3692 | AAGUAAGU GGAGGAAACUCC CU UCAAGGACAUCGUCCGGG UAAGGAAG | 8919 |
| 4482 | UUACUUUU G UAAAAAUG | 2645 | CAUUUUUA GGAGGAAACUCC CU UCAAGGACAUCGUCCGGG AAAAGUAA | 8920 |
| 4490 | GUAAAAAU G UCCCCACG | 2646 | CGUGGGGA GGAGGAAACUCC CU UCAAGGACAUCGUCCGGG AUUUUUAC | 8921 |
| 4498 | GUCCCCAC G GUACUUAC | 3693 | GUAAGUAC GGAGGAAACUCC CU UCAAGGACAUCGUCCGGG GUGGGGAC | 8922 |
| 4499 | UCCCCACG G UACUUACU | 2647 | AGUAAGUA GGAGGAAACUCC CU UCAAGGACAUCGUCCGGG CGUGGGGA | 8923 |
| 4515 | UCCCCACU G AUGGACCA | 3694 | UGGUCCAU GGAGGAAACUCC CU UCAAGGACAUCGUCCGGG AGUGGGGA | 8924 |
| 4518 | CCACUGAU G GACCAGUG | 3695 | CACUGGUC GGAGGAAACUCC CU UCAAGGACAUCGUCCGGG AUCAGUGG | 8925 |
| 4519 | CACUGAUG G ACCAGUGG | 3696 | CCACUGGU GGAGGAAACUCC CU UCAAGGACAUCGUCCGGG CAUCAGUG | 8926 |
| 4524 | AUGGACCA G UGGUUUCC | 2648 | GGAAACCA GGAGGAAACUCC CU UCAAGGACAUCGUCCGGG UGGUCCAU | 8927 |
| 4526 | GGACCAGU G GUUUCCAG | 3697 | CUGGAAAC GGAGGAAACUCC CU UCAAGGACAUCGUCCGGG ACUGGUCC | 8928 |
| 4527 | GACCAGUG G UUUCCAGU | 2649 | ACUGGAAA GGAGGAAACUCC CU UCAAGGACAUCGUCCGGG CACUGGUC | 8929 |
| 4534 | GGUUUCCA G UCAUGAGC | 2650 | GCUCAUGA GGAGGAAACUCC CU UCAAGGACAUCGUCCGGG UGGAAACC | 8930 |
| 4539 | CCAGUCAU G AGCGUUAG | 3698 | CUAACGCU GGAGGAAACUCC CU UCAAGGACAUCGUCCGGG AUGACUGG | 8931 |
| 4541 | AGUCAUGA G CGUUAGAC | 2651 | GUCUAACG GGAGGAAACUCC CU UCAAGGACAUCGUCCCGG UCAUGACU | 8932 |
| 4543 | UCAUGAGC G UUAGACUG | 2652 | CAGUCUAA GGAGGAAACUCC CU UCAAGGACAUCGUCCGGG GCUCAUGA | 8933 |
| 4547 | GAGCGUUA G ACUGACUU | 3699 | AAGUCAGU GGAGGAAACUCC CU UCAAGGACAUCGUCCGGG UAACGCUC | 8934 |
| 4551 | GUUAGACU G ACUUGUUU | 3700 | AAACAAGU GGAGGAAACUCC CU UCAAGGACAUCGUCCGGG AGUCUAAC | 8935 |
| 4556 | ACUGACUU G UUUGUCUU | 2653 | AAGACAAA GGAGGAAACUCC CU UCAAGGACAUCGUCCGGG AAGUCAGU | 8936 |
| 4560 | ACUUGUUU G UCUUCCAU | 2654 | AUGGAAGA GGAGGAAACUCC CU UCAAGGACAUCGUCCGGG AAACAAGU | 8937 |
| 4575 | AUUCCAUU G UUUUGAAA | 2655 | UUUCAAAA GGAGGAAACUCC CU UCAAGGACAUCGUCCGGG AAUGGAAU | 8938 |
| 4580 | AUUGUUUU G AAACUCAG | 3701 | CUGAGUUU GGAGGAAACUCC CU UCAAGGACAUCGUCCGGG AAAACAAU | 8939 |
| 4588 | GAAACUCA G UAUGCCGC | 2656 | GCGGCAUA GGACGAAACUCC CU UCAAGGACAUCGUCCCGG UGAGUUUC | 8940 |
| 4592 | CUCAGUAU G CCGCCCCU | 2657 | AGGGGCGG GGAGGAAACUCC CU UCAAGGACAUCGUCCGGG AUACUGAG | 8941 |
| 4595 | AGUAUGCC G CCCCUGUC | 2658 | GACAGGGG GGAGGAAACUCC CU UCAAGGACAUCGUCCGGG GGCAUACU | 8942 |
| 4601 | CCGCCCCU G UCUUGCUG | 2659 | CAGCAAGA GGAGGAAACUCC CU UCAAGGACAUCGUCCGGG AGGGGCGG | 8943 |
| 4606 | CCUGUCUU G CUGUCAUG | 2660 | CAUGACAG GGAGGAAACUCC CU UCAAGGACAUCGUCCGGG AAGACAGG | 8944 |
| 4609 | GCUGUCAU G UCAUGAAA | 2661 | UUUCAUGA GGAGGAAACUCC CU UCAAGGACAUCGUCCGGG AGCAAGAC | 8945 |
| 4614 | GCUGUCAU G AAAUCAGC | 3702 | GCUGAUUU GGAGGAAACUCC CU UCAAGGACAUCGUCCGGG AUGACAGC | 8946 |
| 4621 | UGAAAUCA G CAAGAGAG | 2662 | CUCUCUUG GGAGGAAACUCC CU UCAAGGACAUCGUCCGGG UGAUUUCA | 8947 |
| 4625 | AUCAGCAA G AGAGGAUG | 3703 | CAUCCUCU GGAGGAAACUCC CU UCAAGGACAUCGUCCGGG UUGCUGAU | 8948 |
| 4627 | CAGCAAGA G AGGAUGAC | 3704 | GUCAUCCU GGAGGAAACUCC CU UCAAGGACAUCGUCCGGG UCUUGCUG | 8949 |
| 4629 | GCAAGAGA G GAUGACAC | 3705 | GUGUCAUC GGAGGAAACUCC CU UCAAGGACAUCGUCCGGG UCUCUUGC | 8950 |
| 4630 | CAAGAGAG G AUGACACA | 3706 | UGUGUCAU GGAGGAAACUCC CU UCAAGGACAUCGUCCGGG CUCUCUUG | 8951 |
| 4633 | GAGAGGAU G ACACAUCA | 3707 | UGAUGUGU GGAGGAAACUCC CU UCAAGGACAUCGUCCGGG AUCCUCUC | 8952 |
| 4653 | AAUAACUC G GAUUCCAG | 3708 | CUGGAAUC GGAGGAAACUCC CU UCAAGGACAUCGUCCGGG GAGUUAUU | 8953 |
| 4654 | AUAACUCG G AUUCCAGC | 3709 | GCUGGAAU GGAGGAAACUCC CU UCAAGGACAUCGUCCGGG CGAGUUAU | 8954 |
| 4661 | GGAUUCCA G CCCACAUU | 2663 | AAUGUGGG GGAGGAAACUCC CU UCAAGGACAUCGUCCGGG UGGAAUCC | 8955 |
| 4670 | CCCACAUU G GAUUCAUC | 3170 | GAUGAUUC GGAGGAAACUCC CU UCAAGGACAUCGUCCGGG AAUGUGGG | 8956 |
| 4671 | CCACAUUG G AUUCAUCA | 3711 | UGAUGAAU GGAGGAAACUCC CU UCAAGGACAUCGUCCGGG CAAUGUGG | 8957 |
| 4680 | AUUCAUCA G CAUUUGGA | 2664 | UCCAAAUG GGAGGAAACUCC CU UCAAGGACAUCGUCCGGG UGAUGAAU | 8958 |
| 4686 | CAGCAUUU G GACCAAUA | 3712 | UAUUGGUC GGAGGAAACUCC CU UCAAGGACAUCGUCCGGG AAAUGCUG | 8959 |
| 4687 | AGCAUUUG G ACCAAUAG | 3713 | CUAUUGGU GGAGGAAACUCC CU UCAAGGACAUCGUCCGGG CAAAUGCU | 8960 |
| 4695 | GACCAAUA G CCCACAGC | 2665 | GCUGUGGG GGAGGAAACUCC CU UCAAGGACAUCGUCCGGG UAUUGGUC | 8961 |
| 4702 | AGCCCACA G CUGAGAAU | 2666 | AUUCUCAG GGAGGAAACUCC CU UCAAGGACAUCGUCCGGG UGUGGGCU | 8962 |
| 4705 | CCACAGCU G AGAAUGUG | 3714 | CACAUUCU GGAGGAAACUCC CU UCAAGGACAUCGUCCGGG AGCUGUGG | 8963 |
| 4707 | ACAGCUGA G AAUGUGGA | 3715 | UCCACAUU GGAGGAAACUCC CU UCAAGGACAUCGUCCGGG UCAGCUGU | 8964 |
| 4711 | CUGAGAAU G UGGAAUAC | 2667 | GUAUUCCA GGAGGAAACUCC CU UCAAGGACAUCGUCCGGG AUUCUCAG | 8965 |
| 4713 | GAGAAUGU G GAAUACCU | 3716 | AGGUAUUC GGAGGAAACUCC CU UCAAGGACAUCGUCCGGG ACAUUCUC | 8966 |
| 4714 | AGAAUGUG G AAUACCUA | 3717 | UAGGUAUU GGAGGAAACUCC CU UCAAGGACAUCGUCCGGG CACAUUCU | 8967 |
| 4724 | AUACCUAA G GAUAACAC | 3718 | GUGUUAUC GGAGGAAACUCC CU UCAAGGACAUCGUCCGGG UUAGGUAU | 8968 |
| 4725 | UACCUAAG G AUAACACC | 3719 | GGUGUUAU GGAGGAAACUCC CU UCAAGGACAUCGUCCGGG CUUAGGUA | 8969 |
| 4734 | AUAACACC G CUUUUGUU | 2668 | AACAAAAG GGAGGAAACUCC CU UCAAGGACAUCGUCCGGG GGUGUUAU | 8970 |
| 4740 | CCGCUUUU G UUCUCGCA | 2669 | UGCGAGAA GGAGGAAACUCC CU UCAAGGACAUCGUCCGGG AAAAGCGG | 8971 |
| 4746 | UUGUUCUC G CAAAAACG | 2670 | CGUUUUUG GGAGGAAACUCC CU UCAAGGACAUCGUCCGGG GAGAACAA | 8972 |
| 4754 | GCAAAAAC G UAUCUCCU | 2671 | AGGAGAUA GGAGGAAACUCC CU UCAAGGACAUCGUCCGGG GUUUUUGC | 8973 |
| 4768 | CCUAAUUU G AGGCUCAG | 3720 | CUGAGCCU GGAGGAAACUCC CU UCAAGGACAUCGUCCGGG AAAUUAGG | 8974 |
| 4770 | UAAUUUGA G GCUCAGAU | 3721 | AUCUGAGC GGAGGAAACUCC CU UCAAGGACAUCGUCCGGG UCAAAUUA | 8975 |
| 4771 | AAUUUGAG G CUCAGAUG | 2672 | CAUCUGAG GGAGGAAACUCC CU UCAAGGACAUCGUCCGGG CUCAAAUU | 8976 |
| 4776 | GAGGCUCA G AUGAAAUG | 3722 | CAUUUCAU GGAGGAAACUCC CU UCAAGGACAUCGUCCGGG UGAGCCUC | 8977 |
| 4779 | GCUCAGAU G AAAUGCAU | 3723 | AUGCAUUU GGAGGAAACUCC CU UCAAGGACAUCGUCCGGG AUCUGAGC | 8978 |
| 4784 | GAUGAAAU G CAUCAGGU | 2673 | ACCUGAUG GGAGGAAACUCC CU UCAAGGACAUCGUCCGGG AUUUCAUC | 8979 |
| 4790 | AUGCAUCA G GUCCUUUG | 3724 | CAAAGGAC GGAGGAAACUCC CU UCAAGGACAUCGUCCGGG UGAUGCAU | 8980 |
| 4791 | UGCAUCAG G UCCUUUGG | 2674 | CCAAAGGA GGAGGAAACUCC CU UCAAGGACAUCGUCCGGG CUGAUGCA | 8981 |
| 4798 | GGUCCUUU G GGGCAUAG | 3725 | CUAUGCCC GGAGGAAACUCC CU UCAAGGACAUCGUCCGGG AAAGGACC | 8982 |
| 4799 | GUCCUUUG G GGCAUAGA | 3726 | UCUAUGCC GGAGGAAACUCC CU UCAAGGACAUCGUCCGGG CAAAGGAC | 8983 |
| 4800 | UCCUUUGG G GCAUAGAU | 3727 | AUCUAUGC GGAGGAAACUCC CU UCAAGGACAUCGUCCGGG CCAAAGGA | 8984 |
| 4801 | CCUUUGGG G CAUAGAUC | 2675 | GAUCUAUG GGAGGAAACUCC CU UCAAGGACAUCGUCCGGG CCCAAAGG | 8985 |
| 4806 | GGGGCAUG G AUCAGAAG | 3728 | CUUCUGUA GGAGGAAACUCC CU UCAAGGACAUCGUCCGGG UAUGCCCC | 8986 |
| 4811 | AUAGAUCA G AAGACUAC | 3729 | GUAGUCUU GGAGGAAACUCC CU UCAAGGACAUCGUCCGGG UGAUCUAU | 8987 |
| 4814 | GAUCAGAA G ACUACAAA | 3730 | UUUGUAGU GGAGGAAACUCC CU UCAAGGACAUCGUCCGGG UUCUGAUC | 8988 |
| 4826 | ACAAAAAU G AAGCUGCU | 3731 | AGCAGCUU GGAGGAAACUCC CU UCAAGGACAUCGUCCGGG AUUUUUGU | 8989 |
| 4829 | AAAAUGAA G CUGCUCUG | 2676 | CAGAGCAG GGAGGAAACUCC CU UCAAGGACAUCGUCCGGG UUCAUUUU | 8990 |
| 4832 | AUGAAGCU G CUCUGAAA | 2677 | UUUCAGAG GGAGGAAACUCC CU UCAAGGACAUCGUCCGGG AGCUUCAU | 8991 |
| 4837 | GCUGCUCU G AAAUCUCC | 3732 | GGAGAUUU GGAGGAAACUCC CU UCAAGGACAUCGUCCGGG AGAGCAGC | 8992 |
| 4850 | CUCCUUUA G CCAUCACC | 2678 | GGUGAUGG GGAGGAAACUCC CU UCAAGGACAUCGUCCGGG UAAAGGAG | 8993 |
| 4876 | CAAAAUUA G UUUGUGUU | 2679 | AACACAAA GGAGGAAACUCC CU UCAAGGACAUCGUCCGGG UAAUUUUG | 8994 |
| 4880 | AUUAGUUU G UGUUACUU | 2680 | AAGUAACA GGAGGAAACUCC CU UCAAGGACAUCGUCCGGG AAACUAAU | 8995 |
| 4882 | UAGUUUGU G UUACUUAU | 2681 | AUAAGUAA GGAGGAAACUCC CU UCAAGGACAUCGUCCGGG ACAAACUA | 8996 |
| 4891 | UUACUUAU G GAAGAUAG | 3733 | CUAUCUUC GGAGGAAACUCC CU UCAAGGACAUCGUCCGGG AUAAGUAA | 8997 |
| 4892 | UACUUAUG G AAGAUAGU | 3734 | ACUAUCUU GGAGGAAACUCC CU UCAAGGACAUCGUCCGGG CAUAAGUA | 8998 |
| 4895 | UUAUGGAA G AUAGUUUU | 3735 | AAAACUAU GGAGGAAACUCC CU UCAAGGACAUCGUCCGGG UUCCAUAA | 8999 |
| 4899 | GGAAGAUA G UUUUCUCC | 2682 | GGAGAAAA GGAGGAAACUCC CU UCAAGGACAUCGUCCGGG UAUCUUCC | 9000 |
| 4926 | CUUCAAAA G CUUUUUAC | 2683 | GUAAAAAG GGAGGAAACUCC CU UCAAGGACAUCGUCCGGG UUUUGAAG | 9001 |
| 4940 | UACUCAAA G ACUAUAUG | 3736 | CAUAUACU GGAGGAAACUCC CU UCAAGGACAUCGUCCGGG UUUGAGUA | 9002 |
| 4942 | CUCAAAGA G UAUAUGUU | 2684 | AACAUAUA GGAGGAAACUCC CU UCAAGGACAUCGUCCGGG UCUUUGAG | 9003 |
| 4948 | GAGUAUAU G UUCCCUCC | 2685 | GGAGGGAA GGAGGAAACUCC CU UCAAGGACAUCGUCCGGG AUAUACUC | 9004 |
| 4958 | UCCCUCCA G GUCAGCUG | 3737 | CACCUGAC GGAGGAAACUCC CU UCAAGGACAUCGUCCGGG UGGAGGGA | 9005 |
| 4959 | CCCUCCAG G UCAGCUGC | 2686 | GCAGCUGA GGAGGAAACUCC CU UCAAGGACAUCGUCCGGG CUGGAGGG | 9006 |
| 4963 | CCAGGUCA G CUGCCCCC | 2687 | GGGGGCAG GGAGGAAACUCC CU UCAAGGACAUCGUCCGGG UGACCUGG | 9007 |
| 4966 | GGUCAGCU G CCCCCAAA | 2688 | UUUGGGGG GGAGGAAACUCC CU UCAAGGACAUCGUCCGGG AGCUGACC | 9008 |
| 4987 | CUCCUUAC G CUUUGUCA | 2689 | UGACAAAG GGAGGAAACUCC CU UCAAGGACAUCGUCCGGG GUAAGGAG | 9009 |
| 4992 | UACGCUUU G UCACACAA | 2690 | UUGUGUGA GGAGGAAACUCC CU UCAAGGACAUCGUCCGGG AAAGCGUA | 9010 |
| 5004 | CACAAAAA G UGUCUCUG | 2691 | CAGAGACA GGAGGAAACUCC CU UCAAGGACAUCGUCCGGG UUUUUGUG | 9011 |
| 5006 | CAAAAAGU G UCUCUGCC | 2692 | GGCAGAGA GGAGGAAACUCC CU UCAAGGACAUCGUCCGGG ACUUUUUG | 9012 |
| 5012 | GUGUCUCU G CCUUGAGU | 2693 | ACUCAAGG GGAGGAAACUCC CU UCAAGGACAUCGUCCGGG AGAGACAC | 9013 |
| 5017 | UCUGCCUU G AGUCAUCU | 3738 | AGAUGACU GGAGGAAACUCC CU UCAAGGACAUCGUCCGGG AAGGCAGA | 9014 |
| 5019 | UGCCUUGA G UCAUCUAU | 2694 | AUAGAUGA GGAGGAAACUCC CU UCAAGGACAUCGUCCGGG UCAAGGCA | 9015 |
| 5032 | CUAUUCAA G CACUUACA | 2695 | UGUAAGUG GGAGGAAACUCC CU UCAAGGACAUCGUCCGGG UUGAAUAG | 9016 |
| 5041 | CACUUACA G CUCUGGCC | 2696 | GGCCAGAG GGAGGAAACUCC CU UCAAGGACAUCGUCCGGG UGUAAGUG | 9017 |
| 5046 | ACAGCUCU G GCCACAAC | 3739 | GUUGUGGC GGAGGAAACUCC CU UCAAGGACAUCGUCCGGG AGAGCUGU | 9018 |
| 5047 | CAGCUCUG G CCACAACA | 2697 | UGUUGUGG GGAGGAAACUCC CU UCAAGGACAUCGUCCGGG CAGAGCUG | 9019 |
| 5056 | CCACAACA G GGCAUUUU | 3740 | AAAAUGCC GGAGGAAACUCC CU UCAAGGACAUCGUCCGGG UGUUGUGG | 9020 |
| 5057 | CACAACAG G GCAUUUUA | 3741 | UAAAAUGC GGAGGAAACUCC CU UCAAGGACAUCGUCCGGG CUGUUGUG | 9021 |
| 5058 | ACAACAGG G CAUUUUAC | 2698 | GUAAAAUG GGAGGAAACUCC CU UCAAGGACAUCGUCCGGG CCUGUUGU | 9022 |
| 5068 | AUUUUACA G GUGCGAAU | 3742 | AUUCGCAC GGAGGAAACUCC CU UCAAGGACAUCGUCCGGG UGUAAAAU | 9023 |
| 5069 | UUUUACAG G UGCGAAUG | 2699 | CAUUCGCA GGAGGAAACUCC CU UCAAGGACAUCGUCCGGG CUGUAAAA | 9024 |
| 5071 | UUACAGGU G CGAAUGAC | 2700 | GUCAUUCG GGAGGAAACUCC CU UCAAGGACAUCGUCCGGG ACCUGUAA | 9025 |
| 5073 | ACAGGUGC G AAUGACAG | 3743 | CUGUCAUU GGAGGAAACUCC CU UCAAGGACAUCGUCCGGG GCACCUGU | 9026 |
| 5077 | GUGCGAAU G ACAGUAGC | 3744 | GCUACUGU GGAGGAAACUCC CU UCAAGGACAUCGUCCGGG AUUCGCAC | 9027 |
| 5081 | GAAUGACA G UAGCAUUA | 2701 | UAAUGCUA GGAGGAAACUCC CU UCAAGGACAUCGUCCGGG UGUCAUUC | 9028 |
| 5084 | UGACAGUA G CAUUAUGA | 2702 | UCAUAAUG GGAGGAAACUCC CU UCAAGGACAUCGUCCGGG UACUGUCA | 9029 |
| 5091 | AGCAUUAU G AGUAGUGU | 3745 | ACACUACU GGAGGAAACUCC CU UCAAGGACAUCGUCCGGG AUAAUGCU | 9030 |
| 5093 | CAUUAUGA G UAGUGUGA | 2703 | UCACACUA GGAGGAAACUCC CU UCAAGGACAUCGUCCGGG UCAUAAUC | 9031 |
| 5096 | UAUGAGUA G UGUGAAUU | 2704 | AAUUCACA GGAGGAAACUCC CU UCAAGGACAUCGUCCGGG UACUCAUA | 9032 |
| 5098 | UGAGUAGU G UGAAUUCA | 2705 | UGAAUUCA GGAGGAAACUCC CU UCAAGGACAUCGUCCGGG ACUACUCA | 9033 |
| 5100 | AGUAGUGU G AAUUCAGG | 3746 | CCUGAAUU GGAGGAAACUCC CU UCAAGGACAUCGUCCGGG ACACUACU | 9034 |
| 5107 | UGAAUUCA G GUAGUAAA | 3747 | UUUACUAC GGAGGAAACUCC CU UCAAGGACAUCGUCCGGG UGAAUUCA | 9035 |
| 5108 | GAAUUCAG G UAGUAAAU | 2706 | AUUUACUA GGAGGAAACUCC CU UCAAGGACAUCGUCCGGG CUGAAUUC | 9036 |
| 5111 | UUCAGGUA G UAAAUAUG | 2707 | CAUAUUUA GGAGGAAACUCC CU UCAAGGACAUCGUCCGGG UACCUGAA | 9037 |
| 5119 | GUAAAUAU G AAACUAGG | 3748 | CCUAGUUU GGAGGAAACUCC CU UCAAGGACAUCGUCCGGG AUAUUUAC | 9038 |
| 5126 | UGAAACUA G GGUUUGAA | 3749 | UUCAAACC GGAGGAAACUCC CU UCAAGGACAUCGUCCGGG UAGUUUCA | 9039 |
| 5127 | GAAACUAG G GUUUGAAA | 3750 | UUUCAAAC GGAGGAAACUCC CU UCAAGGACAUCGUCCGGG CUAGUUUC | 9040 |
| 5128 | AAACUAGG G UUUGAAAU | 2708 | AUUUCAAA GGAGGAAACUCC CU UCAAGGACAUCGUCCGGG CCUAGUUU | 9041 |
| 5132 | UAGGGUUU G AAAUUGAU | 3751 | AUCAAUUU GGAGGAAACUCC CU UCAAGGACAUCGUCCGGG AAACCCUA | 9042 |
| 5138 | UUGAAAUU G AUAAUGCU | 3752 | AGCAUUAU GGAGGAAACUCC CU UCAAGGACAUCGUCCGGG AAUUUCAA | 9043 |
| 5144 | UUGAUAAU G CUUUCACA | 2709 | UGUGAAAG GGAGGAAACUCC CU UCAAGGACAUCGUCCGGG AUUAUCAA | 9044 |
| 5159 | CAACAUUU G CAGAUGUU | 2710 | AACAUCUG GGAGGAAACUCC CU UCAAGGACAUCGUCCGGG AAAUGUUG | 9045 |
| 5162 | CAUUUGCA G AUGUUUUA | 3753 | UAAAACAU GGAGGAAACUCC CU UCAAGGACAUCGUCCGGG UGCAAAUG | 9056 |
| 5165 | UUGCAGAU G UUUUAGAA | 2711 | UUCUAAAA GGAGGAAACUCC CU UCAAGGACAUCGUCCGGG AUCUGCAA | 9047 |
| 5171 | AUGUUUUA G AAGGAAAA | 3754 | UUUUCCUU GGAGGAAACUCC CU UCAAGGACAUCGUCCGGG UAAAACAU | 9048 |
| 5174 | UUUUAGAA G GAAAAAAG | 3755 | CUUUUUUC GGAGGAAACUCC CU UCAAGGACAUCGUCCGGG UUCUAAAA | 9049 |
| 5175 | UUUAGAAC G AAAAAAGU | 3756 | ACUUUUUU GGAGGAAACUCC CU UCAAGGACAUCGUCCGCG CUUCUAAA | 9050 |
| 5182 | GGAAAAAA G UUCCUUCC | 2712 | GGAAGGAA GGAGGAAACUCC CU UCAAGGACAUCGUCCGGG UUUUUUCC | 9051 |
| 5212 | CUACAAUU G GAAGAUUG | 3757 | CAAUCUUC GGAGGAAACUCC CU UCAAGGACAUCGUCCGGG AAUUGUAC | 9052 |
| 5213 | UACAAUUG G AAGAUUCG | 3758 | CCAAUCUU GGAGGAAACUCC CU UCAAGGACAUCGUCCGGG CAAUUGUA | 9053 |
| 5216 | AAUUCGAA G AUUGGAAG | 3759 | CUUCCAAU GGAGGAAACUCC CU UCAAGGACAUCGUCCGGG UUCCAAUU | 9054 |
| 5220 | GGAAGAUU G GAAGAUUC | 3760 | GAAUCUUC GGAGGAAACUCC CU UCAAGGACAUCGUCCGGG AAUCUUCC | 9055 |
| 5221 | GAAGAUUG G AAGAUUCA | 3761 | UGAAUCUU GGAGGAAACUCC CU UCAAGGACAUCCUCCGGG UUCCAAUC | 9056 |
| 5224 | GAUUGGAA G AUUCAGCU | 3762 | AGCUGAAU GGAGGAAACUCC CU UCAAGGACAUCGUCCGGG UGAAUCUU | 9057 |
| 5230 | AACAUUCA G CUAGUUAG | 2713 | CUAACUAG GGAGGAAACUCC CU UCAAGGACAUCGUCCGGG UGAAUCUU | 9058 |
| 5234 | UUCAGCUA G UUAGGAGC | 2714 | GCUCCUAA GGAGGAAACUCC CU UCAAGGACAUCGUCCGGG UAGCUGAA | 9059 |
| 5038 | GCUAGUUA G GAGCCCAU | 3763 | AUGGGCUC GGAGGAAACUCC CU UCAAGGACAUCGUCCGGG UAACUAGC | 9060 |
| 5239 | CUAGUUAG G AGCCCAUU | 3764 | AAUGGGCU GGAGGAAACUCC CU UCAAGGACAUCGUCCGGG CUAACUAG | 9061 |
| 5214 | AGUUAGGA G CCCAUUUU | 2715 | AAAAUGGG GGAGGAAACUCC CU UCAAGGACAUCGUCCGGG UCCUAACU | 9062 |
| 5260 | CCUAAUCU G UGUGUGCC | 2716 | GGCACACA GGAGGAAACUCC CU UCAAGGACAUCGUCCGGG AGAUUAGG | 9063 |
| 5262 | UAAUCUGU G UGUGCCCU | 2717 | AGGGCACA GGAGGAAACUCC CU UCAAGGACAUCGUCCGGG ACAGAUUA | 9064 |
| 5264 | AUCUGUGU G UGCCCUGU | 2718 | ACAGGGCA GGAGGAAACUCC CU UCAAGGACAUCGUCCGGG ACACAGAU | 9065 |
| 5266 | CUGUGUGU G CCCUGUAA | 2719 | UUACAGGG GGAGGAAACUCC CU UCAAGGACAUCGUCCGGG ACACACAG | 9066 |
| 5271 | UGUGCCCU G UAACCUGA | 2720 | UCAGGUUA GGAGGAAACUCC CU UCAAGGACAUCGUCCGGG AGGGCACA | 9067 |
| 5278 | UGUAACCU G ACUGGUUA | 3765 | UAACCAGU GGAGGAAACUCC CU UCAAGGACAUCGUCCGGG AGGUUACA | 9068 |
| 5282 | ACCUGACU G GUUAACAG | 3766 | CUGUUAAC GGAGGAAACUCC CU UCAAGGACAUCGUCCGGG AGUCAGGU | 9069 |
| 5283 | CCUGACUG G UUAACAGC | 2721 | GCUGUUAA GGAGGAAACUCC CU UCAAGGACAUCGUCCGGG CAGUCAGG | 9070 |
| 5290 | GGUUAACA G CAGUCCUU | 2722 | AAGGACUG GGAGGAAACUCC CU UCAAGGACAUCGUCCGGG UGUUAACC | 9071 |
| 5293 | UAACAGCA G UCCUUUGU | 2723 | ACAAAGGA GGAGGAAACUCC CU UCAAGGACAUCGUCCGGG UGCUGUUA | 9072 |
| 5300 | AGUCCUUU G UAAACAGU | 2724 | ACUGUUUA GGAGGAAACUCC CU UCAAGGACAUCGUCCGGG AAAGGACU | 9073 |
| 5307 | UGUAAACA G UGUUUUAA | 2725 | UUAAAACA GGAGGAAACUCC CU UCAAGGACAUCGUCCGGG UGUUUACA | 9074 |
| 5309 | UAAACAGU G UUUUAAAC | 2726 | GUUUAAAA GGAGGAAACUCC CU UCAAGGACAUCGUCCGGG ACUGUUUA | 9075 |
| 5325 | CUCUCCUA G UCAAUAUC | 2727 | GAUAUUGA GGAGGAAACUCC CU UCAAGGACAUCGUCCGGG UAGGAGAG | 9076 |
| 5354 | UUUAUCAA G GAAGAAAU | 3767 | AUUUCUUC GGAGGAAACUCC CU UCAAGGACAUCGUCCGGG UUGAUAAA | 9077 |
| 5355 | UUAUCAAG G AAGAAAUG | 3768 | CAUUUCUU GGAGGAAACUCC CU UCAAGGACAUCGUCCGGG CUUGAUAA | 9078 |
| 5358 | UCAAGGAA G AAAUGGUU | 3769 | AACCAUUU GGAGGAAACUCC CU UCAAGGACAUCGUCCGGG UUCCUUGA | 9079 |
| 5363 | GAAGAAAU G GUUCAGAA | 3770 | UUCUGAAC GGAGGAAACUCC CU UCAAGGACAUCGUCCGGG AUUUCUUC | 9080 |
| 5364 | AAGAAAUG G UUCAGAAA | 2728 | UUUCUGAA GGAGGAAACUCC CU UCAAGGACAUCGUCCGGG CAUUUCUU | 9081 |
| 5369 | AUGGUUCA G AAAAUAUU | 3771 | AAUAUUUU GGAGGAAACUCC CU UCAAGGACAUCGUCCGGG UGAACCAU | 9082 |
| 5382 | UAUUUUCA G CCUACAGU | 2729 | ACUGUAGG GGAGGAAACUCC CU UCAAGGACAUCGUCCGGG UGAAAAUA | 9083 |
| 5389 | AGCCUACA G UUAUGUUC | 2730 | GAACAUAA GGAGGAAACUCC CU UCAAGGACAUCGUCCGGG UGUAGGCU | 9084 |
| 5394 | ACAGUUAU G UUCAGUCA | 2731 | UGACUGAA GGAGGAAACUCC CU UCAAGGACAUCGUCCGGG AUAACUGU | 9085 |
| 5399 | UAUGUUCA G UCACACAC | 2732 | GUGUGUGA GGAGGAAACUCC CU UCAAGGACAUCGUCCGGG UGAACAUA | 9086 |
| 5419 | UACAAAAU G UUCCUUUU | 2733 | AAAAGGAA GGAGGAAACUCC CU UCAAGGACAUCGUCCGGG AUUUUGUA | 9087 |
| 5428 | UUCCUUUU G CUUUUAAA | 2734 | UUUAAAAG GGAGGAAACUCC CU UCAAGGACAUCGUCCGGG AAAAGGAA | 9088 |
| 5437 | CUUUUAAA G UAAUUUUU | 2735 | AAAAAUUA GGAGGAAACUCC CU UCAAGGACAUCGUCCGGG UUUAAAAG | 9089 |
| 5446 | UAAUUUUU G ACUCCCAG | 3772 | CUGGGAGU GGAGGAAACUCC CU UCAAGGACAUCGUCCGGG AAAAAUUA | 9090 |
| 5454 | GACUCCCA G AUCAGUCA | 3773 | UGACUGAU GGAGGAAACUCC CU UCAAGGACAUCGUCCGGG UGGGAGUC | 9091 |
| 5459 | CCAGAUCA G UCAGAGCC | 2736 | GGCUCUGA GGAGGAAACUCC CU UCAAGGACAUCGUCCGGG UGAUCUGG | 9092 |
| 5463 | AUCAGUCA G AGCCCCUA | 3774 | UAGGGGCU GGAGGAAACUCC CU UCAAGGACAUCGUCCGGG UGACUGAU | 9093 |
| 5465 | CAGUCAGA G CCCCUACA | 2737 | UGUAGGGG GGAGGAAACUCC CU UCAAGGACAUCGUCCGGG UCUGACUG | 9094 |
| 5474 | CCCCUACA G CAUUGUUA | 2738 | UAACAAUG GGAGGAAACUCC CU UCAAGGACAUCGUCCGGG UGUAGGGG | 9095 |
| 5479 | ACAGCAUU G UUAAGAAA | 2739 | UUUCUUAA GGAGGAAACUCC CU UCAAGGACAUCGUCCGGG AAUGCUGU | 9096 |
| 5489 | AUUGUUAA G AAAGUAUU | 3775 | AAUACUUU GGAGGAAACUCC CU UCAAGGACAUCGUCCGGG UUAACAAU | 9097 |
| 5488 | UUAAGAAA G UAUUUGAU | 2740 | AUCAAAUA GGAGGAAACUCC CU UCAAGGACAUCGUCCGGG UUUCUUAA | 9098 |
| 5494 | AAGUAUUU G AUUUUUGU | 3776 | ACAAAAAU GGAGGAAACUCC CU UCAAGGACAUCGUCCGGG AAAUACUU | 9099 |
| 5501 | UGAUUUUU G UCUCAAUG | 2741 | CAUUGAGA GGAGGAAACUCC CU UCAAGGACAUCGUCCGGG AAAAAUCA | 9100 |
| 5509 | GUCUCAAU G AAAAUAAA | 3777 | UUUAUUUU GGAGGAAACUCC CU UCAAGGACAUCGUCCGGG AUUGAGAC | 9101 |

Input Sequence = NM_005228.1. Cut Site=G/.
Arm Length = 8. Core Sequence = GGAGGAAACUCC CU UCAAGGACAUCGUCCGGG
NM_005228.1 (Homo sapiens epidermal growth factor receptor (avian erythroblastic leukemia viral (v-erb-b) oncogene homolog) (EGFR), mRNA)

[0225] TABLE VIII
Human EGFR Receptor Nucleic Acid and Target molecules

| RPI# | Alias | Pos | SEQ ID | Target | Enzymatic Nucleic Acid/Antisense | SEQ ID |
|---|---|---|---|---|---|---|
| 5974 | egfr-146 Rz-7 allyl | 146 | 9102 | GUCCAGUAUUGAUCG | cₛgₛaₛuₛcaacUGAuGaggccgaaaggccGaaAcuggacB | 9353 |
| 5975 | egfr-549 Rz-7 allyl | 549 | 9103 | UAGCAGUCUUAUCUA | uₛaₛgₛaₛuaacUGAuGaggccgaaaggccGaaAcugcuaB | 9354 |
| 5976 | egfr-690 Rz-7 allyl | 690 | 9104 | ACAUAGUCAGCAGUG | cₛaₛcₛuₛgcucUGAuGaggccgaaaggccGaaAcuauguB | 9355 |
| 5977 | egfr-1165 Rz-6 allyl | 1165 | 9105 | CAAGUGUAAGAAGUG | aₛcₛuₛuₛcucUGAuGaggccgaaaggccGaaAcacuuB | 9356 |
| 5978 | egfr-1210 Rz-6 allyl | 1210 | 9106 | AAUAGGUAUUGGUGA | cₛaₛcₛcₛaacUGAuGaggccgaaaggccGaaAccuauB | 9357 |
| 5979 | egfr-2015 Rz-6 allyl | 2015 | 9107 | UGGAAGUACGCAGAC | uₛcₛuₛgₛcgcUGAuGaggccgaaaggccGaaAcuuccB | 9358 |
| 5980 | egfr-3126 Rz-6 allyl | 3126 | 9108 | ACCUUGUCAUUCAGG | cₛuₛgₛaₛaucUGAuGaggccgaaaggccGaaAcaaggB | 9359 |
| 5981 | egfr-4094 Rz-7 allyl | 4094 | 9109 | AAAGAGUAUAUUUGA | uₛcₛaₛaₛauacUGAuGaggccgaaaggccGaaAccucuuB | 9360 |
| 5982 | egfr-4165 Rz-7 allyl | 4165 | 9110 | UCAUUGUCGCUAUUG | cₛaₛaₛuₛagccUGAuGaggccgaaaggccGaaAcaaugaB | 9361 |
| 5983 | egfr-4280 Rz-6 allyl | 4280 | 9111 | CACAAGUCUUCCAGA | cₛuₛgₛgₛaacUGAuGaggccgaaaggccGaaAcuuguB | 9362 |
| 5984 | egfr-4394 Rz-6 allyl | 4394 | 9112 | AUCAAGUCAUGGCAG | uₛgₛcₛcₛaucUGAuGaggccgaaaggccGaaAcuugaB | 9363 |
| 5985 | egfr-4404 Rz-7 allyl | 4404 | 9113 | GGCAGGUACAGUAGG | cₛcₛuₛaₛcugcUGAuGaggccgaaaggccGaaAccugccB | 9364 |
| 5986 | egfr-4409 Rz-7 allyl | 4409 | 9114 | GUACAGUAGGAUAAG | cₛuₛuₛaₛucccUGAuGaggccgaaaggccGaaAcuguacB | 9365 |
| 5987 | egfr-4484 Rz-7 allyl | 4484 | 9115 | CUUUUGUAAAAAUGU | aₛcₛaₛuₛuuucUGAuGaggccgaaaggccGaaAcaaaagB | 9366 |
| 5988 | egfr-4501 Rz-6 allyl | 4501 | 9116 | CCACGGUACUUACUC | aₛgₛuₛaₛagcUGAuGaggccgaaaggccGaaAccgugB | 9367 |
| 5989 | egfr-4793 Rz-6 allyl | 4793 | 9117 | AUCAGGUCCUUUGGG | cₛcₛaₛaₛagcUGAuGaggccgaaaggccGaaAccugaB | 9368 |
| 5990 | egfr-4944 Rz-7 allyl | 4944 | 9118 | AAAGAGUAUAUHUUC | gₛaₛaₛcₛauacUGAuGaggccgaaaggccGaaAcucuuuB | 9369 |
| 5991 | egfr-5008 Rz-6 allyl | 5008 | 9119 | AAAGUGUCUCUGCCU | gₛgₛcₛaₛgacUGAuGaggccgaaaggccGaaAcacuuB | 9370 |
| 5992 | egfr-5110 Rz-7 allyl | 5110 | 9120 | UUCAGGUAGUAAAUA | uₛaₛuₛuₛuaccUGAuGaggccgaaaggccGaaAccugaaB | 9371 |
| 5993 | egfr-5401 Rz-7 allyl | 5401 | 9121 | GUUCAGUCACACACA | uₛgₛuₛgₛugucUGAuGaggccgaaaggccGaaAcugaacB | 9372 |
| 7540 | egfr-2015 Rz-6 allyl ALL P = O | 2015 | 9107 | UGGAAGUACGCAGAC | ucugcgcUGauGaggccgaaaggccGaaAcuuccB | 9373 |
| 11698 | GBC3.3 B 7/9/7 B | ctrl | | | BnnnnnnnNₛNₛNₛNₛNₛNₛNₛNₛnnnnnnnB | 9374 |
| 15340 | Sch09:557L23 poly-gln GB3.3 | ctrl | 9122 | AGCAGCAGCAGCAGCAGCAGCAG | BcugcugcTₛGₛCₛTₛGₛCₛTₛGₛCₛugcugcuB | 9375 |
| 19293 | erbB2-972 Zin.Rz-6 NH2 - | ctrl | | | gₛcₛaₛgₛuuggccgaaaggCgagugaGGuCuagcucaB | 9376 |
| 21083 | erbB2-972 Zin.Rz-6 trueSAC2 | ctrl | | | gₛgₛaₛcₛguugCacaugguacacguaCgacgaGGggB | 9377 |
| 21194 | EGFR-189 Amb.Rz-7 | 189 | 9123 | CAGCGAUGCGACCCU | aₛgₛgₛgₛucgggaLucCCUUCaaggaLucCGGGaucgcugB | 9378 |
| 21195 | EGFR-2825 Amb.Rz-6 | 2825 | 9124 | UCAAGUGGAUGGC | gₛcₛcₛaₛucggaLucCCUUCaaggaLucCGGGacuugaB | 9379 |
| 21196 | EGFR-2868 Amb.Rz-6 | 2868 | 9125 | CCACCAGAGUGAU | aₛuₛcₛaₛcuggaLucCCUUCaaggaLucCGGGugguggB | 9380 |
| 21197 | EGFR-2870 Amb.Rz-6 | 2870 | 9126 | ACCAGAGUGAUGU | aₛcₛaₛuₛcaggaLucCCUUCaaggaLucCGGGucugguB | 9381 |
| 21198 | EGFR-3021 Amb.Rz-6 | 3021 | 9127 | CUACAUGAUCAUG | cₛaₛuₛgₛauggaLucCCUUCaaggaLucCGGGauguagB | 9382 |
| 21199 | EGFR-3021 Amb.Rz-7 | 3021 | 9128 | UCUACAUGAUCAUGG | cₛcₛaₛuₛgauggaLucCCUUCaaggaLucCGGGauguagaB | 9383 |
| 21200 | EGFR-3250 Amb.Rz-6 | 3250 | 9129 | CAGCAGGGCUUCU | aₛgₛaₛaₛgcggaLucCCUUCaaggaLucCGGGcugcugB | 9384 |
| 21201 | EGFR-3251 Amb.Rz-6 | 3251 | 9130 | AGCAGGGCUUCUU | aₛaₛgₛaₛagggaLucCCUUCaaggaLucCGGGccugcuB | 9385 |
| 21202 | EGFR-62 Amb.Rz-7 | 62 | 9131 | GACGACAGGCCACCU | aₛgₛgₛuₛggcggaLucCCUUCaaggaLucCGGGugucgucB | 9386 |
| 21203 | EGFR-261 Amb.Rz-7 | 261 | 9132 | GGGCUCUGGAGGAAA | uₛuₛuₛcₛcucggaLucCCUUCaaggaLuc CGGGagagcccB | 9387 |
| 21204 | EGFR-582 Amb.Rz-7 | 582 | 9133 | CCGGACUGAAGGAGC | gₛcₛuₛcₛcuuggaLucCCUUCaaggaLucCGGGaguccggB | 9388 |
| 21205 | EGFR-585 Amb.Rz-7 | 585 | 9134 | GACUGAAGGAGCUGC | gₛcₛaₛgₛcucggaLucCCUUCaaggaLucCGGGuucagucB | 9389 |
| 21206 | EGFR-586 Amb.Rz-7 | 586 | 9135 | ACUGAAGGAGCUGCC | gₛgₛcₛaₛgcuggaLucCCUUCaaggaLucCGGGcuucaguB | 9390 |
| 21207 | EGFR-793 Amb.Rz-7 | 793 | 9136 | GGGUGCAGGAGAGGA | uₛcₛcₛuₛcucggaLucCCUUCaaggaLucCGGGugcacccB | 9391 |
| 21208 | EGFR-796 Amb.Rz-7 | 796 | 9137 | UGCAGGAGAGGAGAA | uₛuₛcₛuₛccuggaLucCCUUCaaggaLucCGGGuccugcaB | 9392 |
| 21209 | EGFR-801 Amb.Rz-7 | 801 | 9138 | GAGAGGAGAACUGCC | gₛgₛcₛaₛguuggaLucCCUUCaaggaLucCGGGuccucucB | 9393 |
| 21210 | EGFR-1141 Amb.Rz-7 | 1141 | 9139 | UGAGAUGGAGGAAGA | uₛcₛuₛuₛccuggaLucCCUUCaaggaLucCGGGcaucucaB | 9394 |
| 21211 | EGFR-1504 Amb.Rz-7 | 1504 | 9140 | UCUUGCAGUCGUCAG | cₛuₛgₛaₛcgaggaLucCCUUCaaggaLucCGGGugcaagaB | 9395 |
| 21212 | EGFR-1903 Amb.Rz-7 | 1903 | 9141 | CUGCACAGGACGGGG | cₛcₛcₛcₛgucggaLucCCUUCaaggaLucCGGGugugcagB | 9396 |
| 21213 | EGFR-1915 Amb.Rz-7 | 1915 | 9142 | GGGACCAGACAACUG | cₛaₛgₛuₛuguggaLucCCUUCaaggaLucCGGGuggucccB | 9397 |
| 21214 | EGFR-2241 Amb.Rz-7 | 2241 | 9143 | UGCAGGAGAGGGAGC | gₛcₛuₛcₛccuggaLucCCUUCaaggaLucCGGGuccugcaB | 9398 |
| 21215 | EGFR-2673 Amb.Rz-7 | 2673 | 9144 | ACUUGGAGGACCGUC | gₛaₛcₛgₛgucggaLucCCUUCaaggaLucCGGGuccaaguB | 9399 |
| 21216 | EGFR-2907 Amb.Rz-7 | 2907 | 9145 | GGGAGUUGAUGACCU | aₛgₛgₛuₛcauggaLucCCUUCaaggaLucCGGGaacucccB | 9400 |
| 21217 | EGFR-3433 Amb.Rz-7 | 3433 | 9146 | CAGCAUAGACGACAC | gₛuₛgₛuₛcguggaLucCCUUCaaggaLucCGGGuaugcugB | 9401 |
| 21218 | EGFR-3784 Amb.Rz-7 | 3784 | 9147 | CCUAAGGGUCGCGCC | gₛgₛcₛgₛcgaggaLucCCUUCaaggaLucCGGGccuuaggB | 9402 |
| 21219 | EGFR-3818 Amb.Rz-7 | 3818 | 9148 | GGAGCAUGACCACGG | cₛcₛgₛuₛgguggaLucCCUUCaaggaLucCGGGaugcuccB | 9403 |
| 21220 | EGFR-ctrl Amb.Rz-7 (SAC) | ctrl | 9149 | CAUUGUAGGCCACGC | gₛcₛgₛuₛggcggaLucCaaCUUCggaLucCGGGuacaaugB | 9404 |
| 21221 | EGFR-ctrl Amb.Rz-7 (SAC) | ctrl | 9150 | CGCAACUGGCUGUAC | gₛuₛaₛcₛagcggaLucCaaCUUCggaLucCGGGaguugcgB | 9405 |
| 21255 | EGFR-3017 Rz-6 allyl | 3017 | 9151 | AUGUCUACAUGAU | aₛuₛcₛaₛugcUGAuGaggccguuaggccGaaAgacaucB | 9406 |
| 21256 | EGFR-3017 Rz-7 allyl | 3017 | 9152 | GAUGUCUACAUGAUC | gₛaₛuₛcₛaugcUGAuGaggccguuaggccGaaAgacaucB | 9407 |
| 21257 | EGFR-3024 Rz-6 allyl | 3024 | 9153 | CAUGAUCAUGGUC | gₛaₛcₛcₛaucUGAuGaggccguuaggccGaaAucaugB | 9408 |
| 21258 | EGFR-3024 Rz-7 allyl | 3024 | 9154 | ACAUGAUCAUGGUCA | uₛgₛaₛcₛcaucUGAuGaggccguuaggccGaaAucauguB | 9409 |
| 21259 | EGFR-73 Rz-7 allyl | 73 | 9155 | ACCUCGUCGGCGUCC | gₛgₛaₛcₛgcccUGAuGaggccguuaggccGaaAcgagguB | 9410 |
| 21260 | EGFR-259 Rz-6 allyl | 259 | 9156 | CGGGCUCUGGAGG | cₛcₛuₛcₛcacUGAuGaggccguuaggccGaaAgcccgB | 9411 |
| 21261 | EGFR-448 Rz-7 allyl | 448 | 9157 | GGCUGGUUAUGUCCU | aₛgₛgₛaₛcaucUGAuGaggccguuaggccGaaAccagccB | 9412 |
| 21262 | EGFR-449 Rz-7 allyl | 449 | 9158 | GCUGGUUAUGUCCUC | gₛaₛgₛgₛacacUGAuGaggccguuaggccGaaAaccagcB | 9413 |
| 21263 | EGFR-456 Rz-7 allyl | 456 | 9159 | AUGUCCUCAUUGCCC | gₛgₛgₛcₛaaucUGAuGaggccguuaggccGaaAggacauB | 9414 |
| 21264 | EGFR-987 Rz-6 allyl | 987 | 9160 | CCCACUCAUGCUC | gₛaₛgₛcₛaucUGAuGaggccguuaggccGaaAgugggB | 9415 |
| 21265 | EGFR-993 Rz-7 allyl | 993 | 9161 | UCAUGCUCUACAACC | gₛgₛuₛuₛguacUGAuGaggccguuaggccGaaAgcaugaB | 9416 |
| 21266 | EGFR-1198 Rz-6 allyl | 1198 | 9162 | GUGUGUAACGGAA | uₛuₛcₛcₛgucUGAuGaggccguuaggccGaaAcacacB | 9417 |
| 21267 | EGFR-1206 Rz-7 allyl | 1206 | 9163 | ACGGAAUAGGUAUUG | cₛaₛaₛuₛacccUGAuGaggccguuaggccGaaAuuccguB | 9418 |
| 21268 | EGFR-1328 Rz-6 allyl | 1328 | 9164 | ACUCCUUCACACA | uₛgₛuₛgₛugcUGAuGaggccguuaggccGaaAggaguB | 9419 |
| 21269 | EGFR-1336 Rz-7 allyl | 1336 | 9165 | CACACAUACUCCUCC | gₛgₛaₛgₛgagcUGAuGaggccguuaggccGaaAugugugB | 9420 |
| 21270 | EGFR-1339 Rz-7 allyl | 1339 | 9166 | ACAUACUCCUCCUCU | aₛgₛaₛgₛgagcUGAuGaggccguuaggccGaaAguauguB | 9421 |
| 21271 | EGFR-1455 Rz-7 allyl | 1455 | 9167 | AGAACCUAGAAAUCA | uₛgₛaₛuₛuuccUGAuGaggccguuaggccGaaAgguucuB | 9422 |
| 21272 | EGFR-1500 Rz-7 allyl | 1500 | 9168 | UUUCUCUUGCAGUCG | cₛgₛaₛcₛugccUGAuGaggccguuaggccGaaAgagaaaB | 9423 |
| 21273 | EGFR-1506 Rz-6 allyl | 1506 | 9169 | UGCAGUCGUCAGC | gₛcₛuₛgₛaccUGAuGaggccguuaggccGaaAcugcaB | 9424 |
| 21274 | EGFR-1629 Rz-6 allyl | 1629 | 9170 | ACUGUUUGGGACC | gₛgₛuₛcₛcccUGAuGaggccguuaggccGaaAacaguB | 9425 |
| 21275 | EGFR-1833 Rz-7 allyl | 1833 | 9171 | GGGAGUUUGUGGAG | uₛcₛuₛcₛcaccUGAuGaggccguuaggccGaaAacucccB | 9426 |
| 21276 | EGFR-1944 Rz-7 allyl | 1944 | 9172 | ACUACAUUGACGGCC | gₛgₛcₛcₛguccUGAuGaggccguuaggccGaaAuguaguB | 9427 |
| 21277 | EGFR-2015 Rz-7 allyl | 2015 | 9107 | UGGAAGUACGCAGAC | gₛuₛcₛuₛgcgcUGAuGaggccguuaggccGaaAcuuccaB | 9428 |
| 21278 | EGFR-2205 Rz-7 allyl | 2205 | 9173 | GCCACAUCGUUCGGA | uₛcₛcₛgₛaaccUGAuGaggccguuaggccGaaAuguggcB | 9429 |
| 21279 | EGFR-2263 Rz-7 allyl | 2263 | 9174 | GCCUCUUACACCCAG | cₛuₛgₛgₛgugcUGAuGaggccguuaggccGaaAagaggcB | 9430 |
| 21280 | EGFR-2306 Rz-7 allyl | 2306 | 9175 | AGGAUCUUGAAGGAA | uₛuₛcₛcₛuuccUGAuGaggccguuaggccGaaAgauccuB | 9431 |
| 21281 | EGFR-2366 Rz-7 allyl | 2366 | 9176 | ACGGUGUAUAAGGGA | uₛcₛcₛcₛuuacUGAuGaggccguuaggccGaaAcaccguB | 9432 |
| 21282 | EGFR-2368 Rz-7 allyl | 2368 | 9177 | GGUGUAUAAGGGACU | aₛgₛuₛcₛccucUGAuGaggccguuaggccGaaAuacaccB | 9433 |
| 21283 | EGFR-2416 Rz-7 allyl | 2416 | 9178 | CGUCGCUAUCAAGGA | uₛcₛcₛuₛugacUGAuGaggccguuaggccGaaAgcgacgB | 9434 |
| 21284 | EGFR-2611 Rz-7 allyl | 2611 | 9179 | AGACAAUAUUGGCUC | gₛaₛgₛcₛcaacUGAuGaggccguuaggccGaaAuugucuB | 9435 |
| 21285 | EGFR-2624 Rz-7 allyl | 2624 | 9180 | UCCCAGUACCUGCUC | gₛaₛgₛcₛaggcUGAuGaggccguuaggccGaaAcugggaB | 9436 |
| 21286 | EGFR-2666 Rz-7 allyl | 2666 | 9181 | AUGAACUACUUGGAG | cₛuₛcₛcₛaagcUGAuGaggccguuaggccGaaAguucauB | 9437 |
| 21287 | EGFR-2669 Rz-6 allyl | 2669 | 9182 | ACUACUUGGAGGA | uₛcₛcₛuₛcccUGAuGaggccguuaggccGaaAguaguB | 9438 |
| 21288 | EGFR-2858 Rz-7 allyl | 2858 | 9183 | AGAAUCUAUACCCAC | gₛuₛgₛgₛguacUGAuGaggccguuaggccGaaAgauucuB | 9439 |
| 21289 | EGFR-2916 Rz-7 allyl | 2916 | 9184 | UGACCUUUGGAUCCA | uₛgₛgₛaₛucccUGAuGaggccguuaggccGaaAaggucaB | 9440 |
| 21290 | EGFR-3160 Rz-7 allyl | 3160 | 9185 | GCCAAGUCCUACAGA | uₛcₛuₛgₛuagcUGAuGaggccguuaggccGaaAcuuggcB | 9441 |
| 21291 | EGFR-3237 Rz-7 allyl | 3237 | 9186 | AGUACCUCAUCCCAC | gₛuₛgₛgₛgaucUGAuGaggccguuaggccGaaAgguacuB | 9442 |
| 21292 | EGFR-3444 Rz-7 allyl | 3444 | 9187 | ACACCUUCCUCCCAG | cₛuₛgₛgₛgagcUGAuGaggccguuaggccGaaAagguguB | 9443 |
| 21293 | EGFR-3473 Rz-6 allyl | 3473 | 9188 | ACCAGUCCGUUCC | gₛgₛaₛaₛcgcUGAuGaggccguuaggccGaaAcugguB | 9444 |
| 21294 | EGFR-3477 Rz-6 allyl | 3477 | 9189 | GUCCGUUCCCAAA | uₛuₛuₛgₛggcUGAuGaggccguuaggccGaaAcggacB | 9445 |
| 21295 | EGFR-3560 Rz-6 allyl | 3560 | 9190 | CACACUACCAGGA | uₛcₛcₛuₛggcUGAuGaggccguuaggccGaaAgugugB | 9446 |
| 21296 | EGFR-3639 Rz-7 allyl | 3639 | 9191 | GCACAUUCGACAGCC | gₛgₛcₛuₛguccUGAuGaggccguuaggccGaaAaugugcB | 9447 |
| 21297 | EGFR-3776 Rz-7 allyl | 3776 | 9192 | GCAGAAUACCUAAGG | cₛcₛuₛuₛaggcUGAuGaggccguuaggccGaaAuucugcB | 9448 |
| 21298 | EGFR-449 Rz-6 allyl | 449 | 9193 | CUGGUUAUGUCCU | aₛgₛgₛaₛcacUGAuGaggccguuaggccGaaAaccagB | 9449 |
| 21299 | EGFR-1072 Rz-7 allyl | 1072 | 9194 | GAAGUGUCCCCGUAA | uₛuₛaₛcₛgggcUGAuGaggccguuaggccGaaAcacuucB | 9450 |
| 21300 | EGFR-1252 Rz-7 allyl | 1252 | 9195 | UACGAAUAUUAAACA | uₛgₛuₛuₛuaacUGauGaggccguuaggccGaaAuucguaB | 9451 |
| 21301 | EGFR-1336 Rz-6 allyl | 1336 | 9196 | ACACAUACUCCUC | gₛaₛgₛgₛagcUGAuGaaccguuaggccGaaAuguguB | 9452 |
| 21302 | EGFR-1342 Rz- 6allyl | 1342 | 9197 | ACUCCUCCUCUGG | cₛcₛaₛgₛagcUGAuGaggccguuaggccGaaAggagB | 9453 |
| 21303 | EGFR-1498 Rz-7 allyl | 1498 | 9198 | GUUUUCUCUUGCAGU | aₛcₛuₛgₛcaacUGAuGaggccguuaggccGaaAgaaaacB | 9454 |
| 21304 | EGFR-2846 Rz-7 allyl | 2846 | 9199 | UCAAUUUUACACAGA | uₛcₛuₛgₛugucUGAuGaggccguuaggccGaaAaauugaB | 9455 |
| 21305 | EGFR-3465 Rz-7 allyl | 3465 | 9200 | AAUACAUAAACCAGU | aₛcₛuₛgₛguucUGAuGaggccguuaggccGaaAuguauuB | 9456 |
| 21306 | EGFR-3808 Rz-7 allyl | 3808 | 9201 | UGAAUUUAUUGGAGC | gₛcₛuₛcₛcaacUGAuGaggccguuaggccGaaAaauucaB | 9457 |
| 21307 | EGFR-370 CHz-6 allyl | 370 | 9202 | GUGGUCCUUGGGA | uₛcₛcₛcₛaacUGAuGaggccguuaggccGaaIaccacB | 9458 |
| 21308 | EGFR-900 CHz-6 allyl | 900 | 9203 | UGCUGCAGGCUGC | gₛcₛaₛgₛcccUGAuGaggccguuaggccGaaIcagcaB | 9459 |
| 21309 | EGFR-2524 CHz-6 allyl | 2524 | 9204 | CUGGGCAUCUGCC | gₛgₛcₛaₛgacUGAuGaggccguuaggccGaaIcccagB | 9460 |
| 21310 | EGFR-2866 CHz-6 allyl | 2866 | 9205 | ACCCACCAGAGUG | cₛaₛcₛuₛcucUGAuGaggccguuaggccGaaIuggguB | 9461 |
| 21311 | EGFR-2867 CHz-7 allyl | 2867 | 9206 | ACCCACCAGAGUGAU | aₛuₛcₛaₛcuccUGAuGaggccguuaggccGaaIguggguB | 9462 |
| 21312 | EGFR-3016 CHz-6 allyl | 3016 | 9207 | GAUGUCUACAUGA | uₛcₛaₛuₛgucUGAuGaggccguuaggccGaaIacaucB | 9463 |
| 21313 | EGFR-3019 CHz-6 allyl | 3019 | 9208 | GUCUACAUGAUCA | uₛgₛaₛuₛcacUGAuGaggccguuaggccGaaIuagacB | 9464 |
| 21314 | EGFR-3025 CHz-6 allyl | 3025 | 9209 | AUGAUCAUGGUCA | uₛgₛaₛcₛcacUGauGaggccguuaggccGaaIaucauB | 9465 |
| 21315 | EGFR-3112 CHz-6 allyl | 3112 | 9210 | GACCCCCAGCGCU | aₛgₛcₛgₛcucUGAuGaggccguuaggccGaaIgggucB | 9466 |
| 21316 | EGFR-143 CHz-7 allyl | 143 | 9211 | UCCGUCCAGUAUUGA | uₛcₛaₛaₛuaccUGauGaggccguuaggccGaaIgacggaB | 9467 |
| 21317 | EGFR-260 CHz-6 allyl | 260 | 9212 | GGGCUCUGGAGGA | uₛcₛcₛuₛcccUGAuGaggccguuaggccGaaIagcccB | 9468 |
| 21318 | EGFR-457 CHz-7 allyl | 457 | 9213 | UGUCCUCAUUGCCCU | aₛgₛgₛgₛcaacUGAuGaggccguuaggccGaaIaggcacaB | 9469 |
| 21319 | EGFR-469 CHz-7 allyl | 469 | 9214 | CCUCAACACAGUGGA | uₛcₛcₛaₛcugcUGAuGaggccguuaggccGaaIuugaggB | 9470 |
| 21320 | EGFR-471 CHz-7 allyl | 471 | 9215 | UCAACACAGUGGAGC | gₛcₛuₛcₛcaccUGAuGaggccguuaggccGaaIuguugaB | 9471 |
| 21321 | EGFR-505 CHz-7 allyl | 505 | 9216 | GCAGAUCAUCAGAGG | cₛcₛuₛcₛugacUGAuGaggccguuaggccGaaIaucugcB | 9472 |
| 21322 | EGFR-595 CHz-7 allyl | 595 | 9217 | GCUGCCCAUGAGAAA | uₛuₛuₛcₛucacUGAuGaggccguuaggccGaaIggcagcB | 9473 |
| 21323 | EGFR-640 CHz-7 allyl | 640 | 9218 | GUUCAGCAACAACCC | gₛgₛgₛuₛugucUGAuGaggccguuaggccGaaIcugaacB | 9474 |
| 21324 | EGFR-781 CHz-7 allyl | 781 | 9219 | UGGGAGCUGCUGGGG | cₛcₛcₛcₛagccUGauGaggccguuaggccGaaIcucccaB | 9475 |
| 21325 | EGFR-792 CHz-7 allyl | 792 | 9220 | GGGGUGCAGGAGAGG | cₛcₛuₛcₛucccUGAuGaggccguuaggccGaaIcaccccB | 9476 |
| 21326 | EGFR-994 CHz-7 allyl | 994 | 9221 | CAUGCUCUACAACCC | gₛgₛgₛuₛugucUGAuGaggccguuaggccGaaIagcaugB | 9477 |
| 21327 | EGFR-1125 CHz-7 allyl | 1125 | 9222 | GUGGGGCCGACAGCU | aₛgₛcₛuₛguccUGAuGaggccguuaggccGaaIccccacB | 9478 |
| 21328 | EGFR-1275 CHz-7 allyl | 1275 | 9223 | ACUGCACCUCCAUCA | uₛgₛaₛuₛggacUGAuGaggccguuaggccGaaIugcaguB | 9479 |
| 21329 | EGFR-1297 CHz-7 allyl | 1297 | 9224 | UCUCCACAUCCUGCC | gₛgₛcₛaₛggacUGAuGaggccguuaggccGaaIuggagaB | 9480 |
| 21330 | EGFR-1454 CHz-7 allyl | 1454 | 9225 | GAGAACCUAGAAAUC | gₛaₛuₛuₛucucUGAuGaggccguuaggccGaaIguucucB | 9481 |
| 21331 | EGFR-1503 CHz-7 allyl | 1503 | 9226 | CUCUUGCAGUCGUCA | uₛgₛaₛcₛgaccUGAuGaggccguuaggccGaaIcaagagB | 9482 |
| 21332 | EGFR-1514 CHz-7 allyl | 1514 | 9227 | GUCAGCCUGAACAUA | uₛaₛuₛgₛuuccUGAuGaggccguuaggccGaaIgcugacB | 9483 |
| 21333 | EGFR-1729 CHz-7 allyl | 1729 | 9228 | CGAGGGCUGCUGGGG | cₛcₛcₛcₛagccUGAuGaggccguuaggccGaaIcccucgB | 9484 |
| 21334 | EGFR-1824 CHz-7 allyl | 1824 | 9229 | GUGAGCCAAGGGAGU | aₛcₛuₛcₛccucUGAuGaggccguuaggccGaaIgcucacB | 9485 |
| 21335 | EGFR-1913 CHz-7 allyl | 1913 | 9230 | CGGGGACCAGACAAC | gₛuₛuₛgₛucuUGAuGaggccguuaggccGaaIuccccgB | 9486 |
| 21336 | EGFR-1914 CHz-6 allyl | 1914 | 9231 | GGGACCAGACAAC | gₛuₛuₛgₛuccUGAuGaggccguuaggccGaaIgucccB | 9487 |
| 21337 | EGFR-2030 CHz-7 allyl | 2030 | 9232 | GCCGGCCAUGUGUGC | gₛcₛaₛcₛacacUGAuGaggccguuaggccGaaIgccggcB | 9488 |
| 21338 | EGFR-2535 CHz-7 allyl | 2535 | 9233 | GCCUCACCUCCACCG | cₛgₛgₛuₛggacUGAaGaggccguuaggccGaaIugaggcB | 9489 |
| 21339 | EGFR-2541 CHz-7 allyl | 2541 | 9234 | CCUCCACCGUGCAAC | gₛuₛuₛgₛcaccUGAuGaggccguuaggccGaaIuggaggB | 9490 |
| 21340 | EGFR-2546 CHz-7 allyl | 2546 | 9235 | ACCGUGCAACUCAUC | gₛaₛuₛgₛagucUGAuGaggccguuaggccGaaIcacgguB | 9491 |
| 21341 | EGFR-2668 CHz-7 allyl | 2668 | 9236 | GAACUACUUGGAGGA | uₛcₛcₛuₛccacUGAuGaggccguuaggccGaaIuaguucB | 9492 |
| 21342 | EGFR-2677 CHz-7 allyl | 2677 | 9237 | GGAGGACCGUCGCUU | aₛaₛgₛcₛgaccUGAuGaggccguuaggccGaaIuccuccB | 9493 |
| 21343 | EGFR-2941 CHz-7 allyl | 2941 | 9238 | CGGAAUCCCUGCCAG | cₛuₛgₛgₛcagcUGAuGaggccguuaggccGaaIauuccgB | 9494 |
| 21344 | EGFR-3111 CHz-7 allyl | 3111 | 9239 | GAGACCCCCAGCGCU | aₛgₛcₛgₛcugcUGAuGaggccguuaggccGaaIggucucB | 9495 |
| 21345 | EGFR-3121 CHz-7 allyl | 3121 | 9240 | GCGCUACCUUGUCAU | aₛuₛgₛaₛcaacUGAuGaggccguuaggccGaaIuagcgcB | 9496 |
| 21346 | EGFR-3122 CHz-7 allyl | 3122 | 9241 | CGCUACCUUGUCAUU | aₛaₛuₛgₛacacUGAuGaggccguuaggccGaaIguagcgB | 9497 |
| 21347 | EGFR-3188 CHz-7 allyl | 3188 | 9242 | CGUGCCCUGAUGGAU | aₛuₛcₛcₛauccUGAuGaggccguuaggccGaaIggcacgB | 9498 |
| 21348 | EGFR-3238 CHz-7 allyl | 3238 | 9243 | GUACCUCAUCCCACA | uₛgₛuₛgₛggacUGAuGaggccguuaggccGaaIagguacB | 9499 |
| 21349 | EGFR-3286 CHz-7 allyl | 3286 | 9244 | GACUCCCCUCCUGAG | cₛuₛcₛaₛggacUGAuGaggccguuaggccGaaIggagucB | 9500 |
| 21350 | EGFR-3445 CHz-7 allyl | 3445 | 9245 | CACCUUCCUCCCAGU | aₛcₛuₛgₛggacUGAuGaggccguuaggccGaaIaaggugB | 9501 |
| 21351 | EGFR-3446 CHz-7 allyl | 3446 | 9246 | ACCUUCCUCCCAGUG | cₛaₛcₛuₛgggcUGAuGaggccguuaggccGaaIgaagguB | 9502 |
| 21352 | EGFR-3474 CHz-6 allyl | 3474 | 9247 | CCAGUCCGUUCCC | gₛgₛgₛaₛaccUGAuGaggccguuaggccGaaIacuggB | 9503 |
| 21353 | EGFR-3536 CHz-7 allyl | 3536 | 9248 | CUGAACCCCGCGCCC | gₛgₛgₛcₛgcgcUGAuGaggccguuaggccGaaIguucagB | 9504 |
| 21354 | EGFR-3554 CHz-7 allyl | 3554 | 9249 | AGAGACCCACACUAC | gₛuₛaₛgₛugucUGAuGaggccguuaggccGaaIgucucuB | 9505 |
| 21355 | EGFR-3555 CHz-7 allyl | 3555 | 9250 | GAGACCCACACUACC | gₛgₛuₛaₛgugcUGAuGaggccguuaggccGaaIggucucB | 9506 |
| 21356 | EGFR-3557 CHz-6 allyl | 3557 | 9251 | ACCCACACUACCA | uₛgₛgₛuₛagcUGauGaggccguuaggccGaaIuggguB | 9507 |
| 21357 | EGFR-3562 CHz-7 allyl | 3562 | 9252 | ACACUACCAGGACCC | gₛgₛgₛuₛccucUGAuGaggccguuaggccGaaIuaguguB | 9508 |
| 21358 | EGFR-3570 CHz-7 allyl | 3570 | 9253 | AGGACCCCCACAGCA | uₛgₛcₛuₛgugcUGAuGaggccguuaggccGaaIgguccuB | 9509 |
| 21359 | EGFR-189 Zin.Rz-7 NH2 | 189 | 9123 | CAGCGAUGCGACCCU | aₛgₛgₛgₛucggccgaaaggCgagugaGguCuaucgcugB | 9510 |
| 21360 | EGFR-2870 Zin.Rz-6 NH2 | 2870 | 9126 | ACCAGAGUGAUGU | aₛcₛaₛuₛcagccgaaaggCgagugaGguCuucugguB | 9511 |
| 21361 | EGFR-3251 Zin.Rz-6 NH2 | 3251 | 9130 | AGCAGGGCUUCUU | aₛaₛgₛaₛaggccgaaaggCgagugaGguCuccugcuB | 9512 |
| 21362 | EGFR-3251 Zin.Rz-7 NH2 | 3251 | 9254 | CAGCAGGGCUUCUUC | gₛaₛaₛgₛaaggccgaaaggCgagugaGguCuccugcugB | 9513 |
| 21363 | EGFR-24 Zin.Rz-6 NH2 | 24 | 9255 | UCCCGAGCUAGCC | gₛgₛcₛuₛaggccgaaaggCgagugaGguCuucgggaB | 9514 |
| 21364 | EGFR-98 Zin.Rz-6 NH2 | 98 | 9256 | CGCCUCGCCGCCA | uₛgₛgₛcₛgggccgaaaggCgagugaGguCugaggcgB | 9515 |
| 21365 | EGFR-98 Zin.Rz-7 NH2 | 98 | 9257 | CCGCCUCGCCGCCAA | uₛuₛgₛgₛcgggccgaaaggCgagugaGguCugaggcggB | 9516 |
| 21366 | EGFR-101 Zin.Rz-7 NH2 | 101 | 9258 | CCUCGCCGCCAACGC | gₛcₛgₛuₛugggccgaaaggCgagugaGguCuggcgaggB | 9517 |
| 21367 | EGFR-139 Zin.Rz-6 NH2 | 139 | 9259 | GACUCCGUCCAGU | aₛcₛuₛgₛgagccgaaaggCgagugaGguCuggagucB | 9518 |
| 21368 | EGFR-139 Zin.Rz-7 NH2 | 139 | 9260 | UGACUCCGUCCAGUA | uₛaₛcₛuₛggagccgaaaggCgagugaGguCuggagucaB | 9519 |
| 21369 | EGFR-472 Zin.Rz-7 NH2 | 472 | 9261 | CAACACAGUGGAGCG | cₛgₛcₛuₛccagccgaaaggCgagugaGguCuuguguugB | 9520 |
| 21370 | EGFR-588 Zin.Rz-6 NH2 | 588 | 9262 | GAAGGAGCUGCCC | gₛgₛgₛcₛaggccgaaaggCgagugaGguCuuccuucB | 9521 |
| 21371 | EGFR-588 Zin.Rz-7 NH2 | 588 | 9263 | UGAAGGAGCUGCCCA | uₛgₛgₛgₛcaggccgaaaggCgagugaGguCuuccuucaB | 9522 |
| 21372 | EGFR-714 Zin.Rz-7 NN2 | 714 | 9264 | GCAACAUGUCGAUGG | cₛcₛaₛuₛcgagccgaaaggCgagugaGguCuauguugcB | 9523 |
| 21373 | EGFR-782 Zin.Rz-7 NH2 | 782 | 9265 | GGGAGCUGCUGGGGU | aₛcₛcₛcₛcaggccgaaaggCgagugaGguCuagcucccB | 9524 |
| 21374 | EGFR-923 Zin.Rz-7 NH2 | 923 | 9266 | CGGGAGAGCGACUGC | gₛcₛaₛgₛucggccgaaaggCgagugaGguCuucucccgB | 9525 |
| 21375 | EGFR-990 Zin.Rz-7 NH2 | 990 | 9267 | CACUCAUGCUCUACA | uₛgₛuₛaₛgaggccgaaaggCgagugaGguCuaugagugB | 9526 |
| 21376 | EGFR-1008 Zin.Rz-7 NH2 | 1008 | 9268 | CCACCACGUACCAGA | uₛcₛuₛgₛguagccgaaaggCgagugaGguCugugguggB | 9527 |
| 21377 | EGFR-1501 Zin.Rz-7 NH2 | 1501 | 9269 | UUCUCUUGCAGUCGU | aₛcₛgₛaₛcuggccgaaaggCgagugaGguCuaagagaaB | 9528 |
| 21378 | EGFR-1504 Zin.Rz-7 NH2 | 1504 | 9140 | UCUUGCAGUCGUCAG | cₛuₛgₛaₛcgagccgaaaggCgagugaGguCuugcaagaB | 9529 |
| 21379 | EGFR-1507 Zin.Rz-6 NH2 | 1507 | 9270 | GCAGUCGUCAGCC | gₛgₛcₛuₛgagccgaaaggCgagugaGguCugacugcB | 9530 |
| 21380 | EGFR-1507 Zin.Rz-7 NH2 | 1507 | 9271 | UGCAGUCGUCAGCCU | aₛgₛgₛcₛugagccgaaaggCgagugaGguCugacugcaB | 9531 |
| 21381 | EGFR-1640 Zin.Rz-7 NH2 | 1640 | 9272 | ACCUCCGGUCAGAAA | uₛuₛuₛcₛugagccgaaaggCgagugaGguCucggagguB | 9532 |
| 21382 | EGFR-1817 Zin.Rz-6 NH2 | 1817 | 9273 | UGGAGGGUGAGCC | gₛgₛcₛuₛcagccgaaaggCgagugaGguCuccuccaB | 9533 |
| 21383 | EGFR-1929 Zin.Rz-7 NH2 | 1929 | 9274 | GUAUCCAGUGUGCCC | gₛgₛgₛcₛacagccgaaaggCgagugaGguCuuggauacB | 9534 |
| 21384 | EGFR-1931 Zin.Rz-7 NH2 | 1931 | 9275 | AUCCAGUGUGCCCAC | gₛuₛgₛgₛgcagccgaaaggCgagugaGguCuacuggauB | 9535 |
| 21385 | EGFR-2034 Zin.Rz-7 NH2 | 2034 | 9276 | GCCAUGUGUGCCACC | gₛgₛuₛgₛgcagccgaaaggCgagugaGguCuacauggcB | 9536 |
| 21386 | EGFR-2043 Zin.Rz-7 NH2 | 2043 | 9277 | GCCACCUGUGCCAUC | gₛaₛuₛgₛgcagccgaaaggCgagugaGguCuagguggcB | 9537 |
| 21387 | EGFR-2542 Zin.Rz-6 NH2 | 2542 | 9278 | UCCACCGUGCAAC | gₛuₛuₛgₛcagccgaaaggCgagugaGguCugguggaB | 9538 |
| 21388 | EGFR-2542 Zin.Rz-7 NH2 | 2542 | 9279 | CUCCACCGUGCAACU | aₛgₛuₛuₛgcagccgaaaggCgagugaGguCugguggagB | 9539 |
| 21389 | EGFR-2544 Zin.Rz-7 NH2 | 2544 | 9280 | CCACCGUGCAACUCA | uₛgₛaₛgₛuuggccgaaaggCgagugaGguCuacgguggB | 9540 |
| 21390 | EGFR-2622 Zin.Rz-7 NH2 | 2622 | 9281 | GCUCCCAGUACCUGC | gₛcₛaₛgₛguagccgaaaggCgagugaGguCuugggagcB | 9541 |
| 21391 | EGFR-2639 Zin.Rz-7 NH2 | 2639 | 9282 | AACUGGUGUGUGCAG | cₛuₛgₛcₛacagccgaaaggCgagugaGguCuaccaguuB | 9542 |
| 21392 | EGFR-2641 Zin.Rz-7 NH2 | 2641 | 9283 | CUGGUGUGUGCAGAU | aₛuₛcₛuₛgcagccgaaaggCgagugaGguCuacaccagB | 9543 |
| 21393 | EGFR-2678 Zin.Rz-7 NH2 | 2678 | 9284 | GAGGACCGUCGCUUG | cₛaₛaₛgₛcgagccgaaaggCgagugaGguCugguccucB | 9544 |
| 21394 | EGFR-2948 Zin.Rz-7 NH2 | 2948 | 9285 | CCUGCCAGCGAGAUC | gₛaₛuₛcₛucggccgaaaggCgagugaGguCuuggcaggB | 9545 |
| 21395 | EGFR-3033 Zin.Rz-7 NH2 | 3033 | 9286 | UGGUCAAGUGCUGGA | uₛcₛcₛaₛgcagccgaaaggCgagugaGguCuuugaccaB | 9546 |
| 21396 | EGFR-3056 Zin.Rz-7 NH2 | 3056 | 9287 | GCAGAUAGUCGCCCA | uₛgₛgₛgₛcgagccgaaaggCgagugaGguCuuaucugcB | 9547 |
| 21397 | EGFR-3066 Zin.Rz-7 NH2 | 3066 | 9288 | GCCCAAAGUUCCGUG | cₛaₛcₛgₛgaagccgaaaggCgagugaGguCuuuugggcB | 9548 |
| 21398 | EGFR-3124 Zin.Rz-7 NH2 | 3124 | 9289 | CUACCUUGUCAUUCA | uₛgₛaₛaₛugagccgaaaggCgagugaGguCuaagguagB | 9549 |
| 21399 | EGFR-3158 Zin.Rz-7 NH2 | 3158 | 9290 | UUGCCAAGUCCUACA | uₛgₛuₛaₛggagccgaaaggCgagugaGguCuuuggcaaB | 9550 |
| 21400 | EGFR-3182 Zin.Rz-7 NH2 | 3182 | 9291 | UUCUACCGUGCCCUG | cₛaₛgₛgₛgcagccgaaaggCgagugaGguCugguagaaB | 9551 |
| 21401 | EGFR-3214 Zin.Rz-7 NH2 | 3214 | 9292 | GGACGACGUGGUGGA | uₛcₛcₛaₛccagccgaaaggCgagugaGguCugucguccB | 9552 |
| 21402 | EGFR-3293 Zin.Rz-7 NH2 | 3293 | 9293 | CUCCUGAGCUCUCUG | cₛaₛgₛaₛgaggccgaaaggCgagugaGguCuucaggagB | 9553 |
| 21402 | EGFR-3302 Zin.Rz-7 NH2 | 3202 | 9294 | UCUCUGAGUGCAACC | gₛgₛuₛuₛgcagccgaaaggCgagugaGguCuucagagaB | 9554 |
| 21404 | EGFR-3410 Zin.Rz-7 NH2 | 3410 | 9295 | CCCACAGGCGCCUUG | cₛaₛaₛgₛgcggccgaaaggCgagugaGguCucugugggB | 9555 |
| 21405 | EGFR-3451 Zin.Rz-7 NH2 | 3451 | 9296 | CCUCCCAGUGCCUGA | uₛcₛaₛgₛgcagccgaaaggCgagugaGguCuugggaggB | 9556 |
| 21406 | EGFR-3471 Zin.Rz-7 NH2 | 3471 | 9297 | UAAACCAGUCCGUUC | gₛaₛaₛcₛggagccgaaaggCgagugaGguCuugguuuaB | 9557 |
| 21407 | EGFR-3475 Zin.Rz-6 NH2 | 3475 | 9298 | CAGUCCGUUCCCA | uₛgₛgₛgₛaagccgaaaggCgagugaGguCuggacugB | 9558 |
| 21408 | EGFR-3475 Zin.Rz-7 NH2 | 3475 | 9299 | CCAGUCCGUUCCCAA | uₛuₛgₛgₛgaagccgaaaggCgagugaGguCuggacuggB | 9559 |
| 21409 | EGFR-3623 Zin.Rz-7 NH2 | 3623 | 9300 | CCCACCUGUGUCAAC | gₛuₛuₛgₛacagccgaaaggCgagugaGguCuaggugggB | 9560 |
| 21410 | EGFR-3671 Zin.Rz-7 NH2 | 3671 | 9301 | AAAGGCAGCCACCAA | uₛuₛgₛgₛugggccgaaaggCgagugaGguCuugccuuuB | 9561 |
| 21411 | EGFR-3784 Zin.Rz-7 NH2 | 3784 | 9147 | CCUAAGGGUCGCGCC | gₛgₛcₛgₛcgagccgaaaggCgagugaGguCuccuuaggB | 9562 |
| 21412 | EGFR-188 AHz-7 NH2 | 188 | 9302 | GCAGCGAUGCGACCC | gₛgₛgₛuₛcgccUGAUGaggccguuaggccGaaUcgcugcB | 9563 |
| 21413 | EGFR-2525 AHz-6 NH2 | 2525 | 9303 | UGGGCAUCUGCCU | aₛgₛgₛcₛagcUGAUGaggccguuaggccGaaUgcccaB | 9564 |
| 21414 | EGFR-3018 AHz-6 NH2 | 3018 | 9304 | UGUCUACAUGAUC | gₛaₛuₛcₛaucUGAUGaggccguuaggccGaaUagacaB | 9565 |
| 21415 | EGFR-3018 AHz-7 NH2 | 3018 | 9305 | AUGUCUACAUGAUCA | uₛgₛaₛuₛcaucUGAUGaggccguuaggccGaaUagacauB | 9566 |
| 21416 | EGFR-3020 AHz-6 NH2 | 3020 | 9306 | UCUACAUGAUCAU | aₛuₛgₛaₛuccUGAUGaggccguuaggccGaaUguagaB | 9567 |
| 21417 | EGFR-3020 AHz-7 NH2 | 3020 | 9307 | GUCUACAUGAUCAUG | cₛaₛuₛgₛauccUGAUGaggccguuaggccGaaUguagacB | 9568 |
| 21418 | EGFR-3023 AHz-6 NH2 | 3023 | 9308 | ACAUGAUCAUGGU | aₛcₛcₛaₛugcUGAUGaggccguuaggccGaaUcauguB | 9569 |
| 21419 | EGFR-3023 AHz-7 NH2 | 3023 | 9309 | UACAUGAUCAUGGUC | gₛaₛcₛcₛaugcUGAUGaggccguuaggccGaaUcauguaB | 9570 |
| 21420 | EGFR-3026 AHz-6 NH2 | 3026 | 9310 | UGAUCAUGGUCAA | uₛuₛgₛaₛcccUGAUGaggccguuaggccGaaUgaucaB | 9571 |
| 21421 | EGFR-467 AHz-7 NH2 | 467 | 9311 | GCCCUCAACACAGUG | cₛaₛcₛuₛgugcUGAUGaggccguuaggccGaaUgagggcB | 9572 |
| 21422 | EGFR-641 AHz-7 NH2 | 641 | 9312 | UUCAGCAACAACCCU | aₛgₛgₛgₛuugcUGAUGaggccguuaggccGaaUgcugaaB | 9573 |
| 21423 | EGFR-999 AHz-7 NH2 | 999 | 9313 | UCUACAACCCCACCA | uₛgₛgₛuₛgggcUGAUGaggccguuaggccGaaUuguagaB | 9574 |
| 21424 | EGFR-1037 AHz-7 NH2 | 1037 | 9314 | GAGGGCAAAUACAGC | gₛcₛuₛgₛuaucUGAUGaggccguuaggccGaaUgcccucB | 9575 |
| 21425 | EGFR-1146 AHz-7 NH2 | 1146 | 9315 | UGGAGGAAGACGGCG | cₛgₛcₛcₛguccUGAUGaggccguuaggccGaaUccuccaB | 9576 |
| 21426 | EGFR-1335 AHz-7 NH2 | 1335 | 9316 | UCACACAUACUCCUC | gₛaₛgₛgₛagucUGAUGaggccguuaggccGaaUgugugaB | 9577 |
| 21427 | EGFR-1459 AHz-7 NH2 | 1459 | 9317 | CCUAGAAAUCAUACG | cₛgₛuₛaₛugacUGAUGaggccguuaggccGaaUucuaggB | 9578 |
| 21428 | EGFR-1993 AHz-7 NH2 | 1993 | 9318 | GGGAGAAAACAACAC | gₛuₛgₛuₛugucUGAUGaggccguuaggccGaaUucucccB | 9579 |
| 21429 | EGFR-2367 AHz-7 NH2 | 2367 | 9319 | CGGUGUAUAAGGGAC | gₛuₛcₛcₛcuucUGAUGaggccguuaggccGaaUacaccgB | 9580 |
| 21430 | EGFR-2540 AHz-7 NH2 | 2540 | 9320 | ACCUCCACCGUGCAA | uₛuₛgₛcₛacgcUGAUGaggccguuaggccGaaUggagguB | 9581 |
| 21431 | EGFR-2660 AHz-7 NH2 | 2660 | 9321 | AAGGGCAUGAACUAC | gₛuₛaₛgₛuuccUGAUGaggccguuaggccGaaUgcccuuB | 9582 |
| 21432 | EGFR-2781 AHz-7 NH2 | 2781 | 9322 | GUGCGGAAGAGAAAG | cₛuₛuₛuₛcuccUGAUGaggccguuaggccGaaUccgcacB | 9583 |
| 21433 | EGFR-3317 AHz-7 NH2 | 3317 | 9323 | AGCAACAAUUCCACC | gₛgₛuₛgₛgaacUGAUGaggccguuaggccGaaUguugcuB | 9584 |
| 21434 | EGFR-3318 AHz-7 NH2 | 3318 | 9324 | GCAACAAUUCCACCG | cₛgₛgₛuₛggacUGAUGaggccguuaggccGaaUuguugcB | 9585 |
| 21435 | EGFR-3467 AHz-7 NH2 | 3467 | 9325 | UACAUAAACCAGUCC | gₛgₛaₛcₛuggcUGAUGaggccguuaggccGaaUuauguaB | 9586 |
| 21436 | EGFR-3556 AHz-7 NH2 | 3556 | 9326 | AGACCCACACUACCA | uₛgₛgₛuₛagucUGAUGaggccguuaggccGaaUgggucuB | 9587 |
| 21437 | EGFR-3558 AHz-6 NH2 | 3558 | 9327 | CCCACACUACCAG | cₛuₛgₛgₛuacUGAUGaggccguuaggccGaaUgugggB | 9588 |
| 21438 | EGFR-3605 AHz-7 NH2 | 3605 | 9328 | UAUCUCAACACUGUC | gₛaₛcₛaₛgugcUGAUGaggccguuaggccGaaUgagauaB | 9589 |
| 21439 | EGFR-ctrl Rz-7 allyl | ctrl | 9329 | CGCACAUHCCAGGUU | aₛaₛcₛcₛuggcUAguGacgccguuaggcgGaaAugugcgB | 9590 |
| 21440 | EGFR-ctrl Rz-7 allyl | ctrl | 9330 | CGCAACUHGCUGUAC | gₛuₛaₛcₛagccUAGuGacgccguuaggcgGaaAguugcgB | 9591 |
| 21441 | EGFR-ctrl CHz-7 allyl | ctrl | 9331 | CUACCGCHUAACGUG | cₛaₛcₛgₛuuacUAGuGacgccguuaggcgGaaIcgguagB | 9592 |
| 21442 | EGFR-ctrl CHz-7 allyl | ctrl | 9332 | GACUUGCHGUAACCC | gₛgₛgₛuₛuaccUAGuGacgccguuaggcgGaaIcaagucB | 9593 |
| 21443 | EGFR-ctrl AHz-7 NH2 | ctrl | 9333 | CGCUUCAHCAGAUGC | gₛcₛaₛuₛcugcUAGUGacgccguuaggcgGaaUgaagcgB | 9594 |
| 21444 | EGFR-ctrl AHz-7 NH2 | ctrl | 9334 | CAUUGUAHGCCACGC | gₛcₛgₛuₛggccUAGUGacgccguuaggcgGaaUacaaugB | 9595 |
| 21445 | EGFR-ctrl Zin.Rz-7 NH2 (SAC) | ctrl | 9149 | CAUUGUAGGCCACGC | gₛcₛgₛuₛggcgccgaaaggCuCugGagugaguacaaugB | 9596 |
| 21446 | EGFR-ctrl Zin.Rz-7 NH2 (SAC) | ctrl | 9150 | CGCAACUGGCUGUAC | gₛuₛaₛcₛagcgccgaaaggCuCugGagugagaguugcgB | 9597 |
| 21542 | EGFR:788L20 GB3.3 | 788 | 9335 | CCCAAUGGGAGCUGCUGGGG | BccccagCₛAₛGₛCₛTₛCₛCₛCₛAₛuugggb | 9598 |
| 21543 | EGFR:821L23 GB3.3 | 821 | 9336 | GAGAACUGCCAGAAACUGACCAA | BuuggucaGₛTₛTₛTₛCₛTₛGₛGₛCₛaguucucB | 9599 |
| 21544 | EGFR:1129L20 GB3.3 | 1129 | 9337 | CCGAGCCUGUGGGGCCGACA | BugucggCₛCₛCₛCₛAₛCₛAₛGₛGₛcucggB | 9600 |
| 21545 | EGFR:1402L23 GB3.3 | 1402 | 9338 | AAAGGAAAUCACAGGGUUUUUGC | BgcaaaaaCₛCₛCₛTₛGₛTₛGₛAₛTₛuuccuuuB | 9601 |
| 21546 | EGFR:1780L20 GB3.3 | 1780 | 9339 | UUGCCGGAAUGUCAGCCGAG | BcucggcTₛGₛAₛCₛAₛTₛTₛCₛCₛggcaaB | 9602 |
| 21547 | EGFR:3174L23 GB3.3 | 3174 | 9340 | UGCCAAGUCCUACAGACUCCAAC | BguuggagTₛCₛTₛGₛTₛAₛGₛGₛAₛcuuggcaB | 9603 |
| 21548 | EGFR:3825L15 GB3.3 | 3825 | 9148 | GGAGCAUGACCACGG | BccgTₛGₛGₛTₛCₛAₛTₛGₛCₛuccB | 9604 |
| 21549 | EGFR:4157L23 GB3.3 | 4157 | 9341 | UUGAUUGGGGAUCUUGGAGUUUU | BaaaacucCₛAₛAₛGₛAₛTₛCₛCₛCₛcaaucaaB | 9605 |
| 21550 | EGFR:3830L23 GB3.3 | 3830 | 9342 | AUUGGAGCAUGACCACGGAGGAU | BauccuccGₛTₛGₛGₛTₛCₛAₛTₛGₛcuccaauB | 9606 |
| 24254 | EGFR-3017 Rz-7 allyl (SAC) | 3017 | 9343 | ACGCUAUAUUGUCGA | uₛcₛgₛaₛcaacUAGuGacgccguuaggcgGaaAuagcguB | 9607 |
| 24255 | EGFR-448 Rz-7 allyl (SAC) | 448 | 9344 | UCUGGUUUCGUAGGC | gₛcₛcₛuₛacgcUAGuGacgccguuaggcgGaaAaccagaB | 9608 |
| 24256 | EGFR-1455 Rz-7 allyl (SAC) | 1455 | 9345 | CCGAAUUAAACGAAA | uₛuₛuₛcₛguucUAGuGacgccguuaggcgGaaAauucggB | 9609 |
| 24257 | EGFR-1506 Rz-6 allyl (SAC) | 1506 | 9346 | GAUGCUCGCGCUA | uₛaₛgₛcₛgccUAGuGacgccguuaggcgGaaAgcaucB | 9610 |
| 24258 | EGFR-3473 Rz-6 allyl (SAC) | 3473 | 9347 | CCGUCUCUCAGCA | uₛgₛcₛuₛgacUAGuGacgccguuaggcgGaaAgacggB | 9611 |
| 24259 | EGFR-900 CHz-6 allyl (SAC) | 900 | 9348 | GCUGCCAGUCGUG | cₛaₛcₛgₛaccUAGuGacgccguuaggcgGaaIgcagcB | 9612 |
| 24260 | EGFR-1514 CHz-7 allyl (SAC) | 1514 | 9349 | CCAUGGCUUGAACAA | uₛuₛgₛuₛucacUAGuGacgccguuaggcgGaaIccauggB | 9613 |
| 24261 | EGFR-2535 CHz-7 allyl (SAC) | 2535 | 9350 | CGUCCGCCACACCUC | gₛaₛgₛgₛugucUAGuGacgccguuaggcgGaaIcggacgB | 9614 |
| 24262 | EGFR-3122 CHz-7 allyl (SAC) | 3122 | 9351 | CCUAUUCUCGCGUUA | uₛaₛaₛcₛgcgcUAGuGacgccguuaggcgGaaIaauaggB | 9615 |
| 24263 | EGFR-3188 CHz-7 allyl (SAC) | 3188 | 9352 | AGCCGACUUUCGUGG | cₛcₛaₛcₛgaacUAGuGacgccguuaggcgGaaIucggcuB | 9616 |
| 24264 | EGFR-3017 Rz-7 allyl (BAC) | 3017 | 9152 | GAUGUCUACAUGAUC | gₛaₛuₛcₛaugcUAGuGacgccguuaggcgGaaAgacaucB | 9617 |
| 24265 | EGFR-448 Rz-7 allyl (BAC) | 448 | 9157 | GGCUGGUUAUGUCCU | aₛgₛgₛaₛcaucUAGuGacgccguuaggcgGaaAccagccB | 9618 |
| 24266 | EGFR-1455 Rz-7 allyl (BAC) | 1455 | 9167 | AGAACCUAGAAAUCA | uₛgₛaₛuₛuuccUAGuGacgccguuaggcgGaaAgguucuB | 9619 |
| 24267 | EGFR-1506 Rz-6 allyl (BAC) | 1506 | 9169 | UGCAGUCGUCAGC | gₛcₛuₛgₛaccUAGuGacgccguuaggcgGaaAcugcaB | 9620 |
| 24268 | EGFR-3473 Rz-6 allyl (BAC) | 3473 | 9188 | ACCAGUCCGUUCC | gₛgₛaₛaₛcgcUAGuGacgccguuaggcgGaaAcugguB | 9621 |
| 24269 | EGFR-900 CHz-6 allyl (BAC) | 900 | 9203 | UGCUGCAGGCUGC | gₛcₛaₛgₛcccUAGuGacgccguuaggcgGaaIcagcaB | 9622 |
| 24270 | EGFR-1514 CHz-7 allyl (BAC) | 1614 | 9227 | GUCAGCCUGAACAUA | uₛaₛuₛgₛuuccUAGuGacgccguuaggcgGaaIgcugacB | 9623 |
| 24271 | EGFR-2535 CHz-7 allyl (BAC) | 2535 | 9233 | GCCUCACCUCCACCG | cₛgₛgₛuₛggacUAGuGacgccguuaggcgGaaIugaggcB | 9624 |
| 24272 | EGFR-3122 CHz-7 allyl (BAC) | 3122 | 9241 | CGCUACCUUGUCAUU | aₛaₛuₛgₛacacUAGuGacgccguuaggcgGaaIguagcgB | 9625 |
| 24273 | EGFR-3188 CHz-7 allyl (BAC) | 3188 | 9242 | CGUGCCCUGAUGGAU | aₛuₛcₛcₛauccUAGuGacgccguuaggcgGaaIggcacgB | 9626 |

A, G, C, U = Ribo
A, G, C, T (italic)= deoxy
lower case = 2′-O-methyl
s = phosphorothioate 3′-internucleotide linkage
L = hexaethylene glycol spacer
U = 2′-deoxy-2′-C-allyl uridine
U = 2′-deoxy-2′-Amino uridine
C = 2′-deoxy-2′-Amino cytidine
I = Inosine
N = any A, G, C, T or U
B = inverted deoxyabasic derivative

[0226] TABLE IX
Comparison of Cell Growth Inhibition by anti-EGFR
nucleic acid molecules

Percent of Untreated

| Cell Type | A549 | SKOv3 | SKOv3 |
|---|---|---|---|
| Treatment | 100 nM | 100 nM | 400 nM |
| Untreated | 100 | 100 | 100 |
| Control GBs | | | |
| 11698 | 18 | 19 | 37 |
| 15340 | 5 | 11 | 14 |
| Control Rzs | | | |
| 21083 | 53 | 23 | 90 |
| 19293 | 17 | 26 | 17 |
| GeneBloc | | | |
| 21542 | 12 | 28 | 27 |
| 21544 | 34 | 33 | 19 |
| Ribozyme | | | |
| 21256 | 13 | 38 | 19 |
| 21261 | 18 | 21 | 41 |
| 21271 | 17 | 18 | 19 |
| 21273 | 20 | 33 | 25 |
| 21293 | 47 | 27 | 25 |
| 21308 | 45 | 22 | 21 |
| 21332 | 47 | 21 | 31 |
| 21338 | 44 | 26 | 53 |
| 21346 | 22 | 30 | 35 |
| 21347 | 22 | 44 | 50 |
| 21439 | 25 | 73 | 23 |
| Tf Control | 45 | 98 | 86 |

[0227] TABLE X
Additional Target Sequences shared by EGFR and HER2

| Pos | SeqID | Seq |
|---|---|---|
| 2860 | 325 | ACCCACCAGAGUGAU |
| 3010 | 3518 | GAUGUCUACAUGAUC |
| 3011 | 2916 | AUGUCUACAUGAUCA |
| 3013 | 2494 | GUCUACAUGAUCAUG |
| 3021 | 9128 | UCUACAUGAUCAUGG |
| 3016 | 1516 | UACAUGAUCAUGGUC |
| 3017 | 346 | ACAUGAUCAUGGUCA |
| 3251 | 9254 | CAGCAGGGCUUCUUC |
| 2861 | 9627 | CCCACCAGAGUGAUG |
| 2862 | 9628 | CCACCAGAGUGAUGU |
| 3012 | 9629 | UGUCUACAUGAUCAU |
| 3015 | 9630 | CUACAUGAUCAUGGU |
| 3018 | 9631 | CAUGAUCAUGGUCAA |

What we claim is:

1. An enzymatic nucleic acid molecule which down regulates expression of an epidermal growth factor receptor (EGFR) gene, wherein said enzymatic nucleic acid molecule is in an Inozyme, Zinzyme, G-cleaver, or Amberzyme configuration.

2. An enzymatic nucleic acid molecule comprising a sequence selected from the group consisting of SEQ ID NOs. 3778-9101, 9353-9373, 9376-9597, and 9607-9589.

3. An enzymatic nucleic acid molecule comprising at least one binding arm wherein one or more of said binding arms comprises a sequence complementary to a sequence selected from the group consisting of SEQ ID NOs. 824-3777 and 9102-9352.

4. An antisense nucleic acid molecule comprising a sequence complementary to a sequence selected from the group consisting of SEQ ID NOs. 9335-9342.

5. An antisense nucleic acid molecule comprising a sequence selected from the group consisting of SEQ ID NOs. 9598-9696.

6. The enzymatic nucleic acid of any of claims 1-3, wherein said enzymatic nucleic acid molecule is adapted to treat cancer.

7. The antisense nucleic acid or claim 4 or claim 5, wherein said antisense nucleic acid molecule is adapted to treat cancer.

8. The enzymatic nucleic acid molecule of any of claims 1-3, wherein said enzymatic nucleic acid molecule has an endcnuclease activity to cleave RNA encoded by an EGFR gene.

9. The enzymatic nucleic acid molecule of claim 1, wherein said enzymatic nucleic acid molecule is in an Inozyme configuration.

10. The enzymatic nucleic acid molecule of claim 1, wherein said enzymatic nucleic acid molecule is in a Zinzyme configuration.

11. The enzymatic nucleic acid molecule of claim 1, wherein said enzymatic nucleic acid molecule is in a G-cleaver configuration.

12. The enzymatic nucleic acid molecule of claim 1, wherein said enzymatic nucleic acid molecule is in an Amberzyme configuration.

13. The enzymatic nucleic acid molecule of claim 9, wherein said Inozyme configuration comprises a sequence complementary to a sequence selected from the group consisting of SEQ ID NOs. 824-2117 and 9202-9253.

14. The enzymatic nucleic acid molecule of claim 9, wherein said Inozyme configuration comprises a sequence selected from the group consisting of SEQ ID NOs. 4601-5894, and 9458-9509.

15. The enzymatic nucleic acid molecule of claim 10, wherein said Zinzyme configuration comprises a sequence complementary to a sequence selected from the group consisting of SEQ ID NOs. 2118-2741, 9123, 9126, 9130, 9140, 9147, and 9254-9301.

16. The enzymatic nucleic acid molecule of claim 10, wherein said Zinzyme configuration comprises a sequence selected from the group consisting of SEQ ID NOs 5895-6518, and 9510-9562.

17. The enzymatic nucleic acid molecule of claim 12, wherein said Amberzyme configuration comprises a sequence complementary to a sequence selected from the group consisting of SEQ ID NOs. 2118-2741 and 3068-3777.

18. The enzymatic nucleic acid molecule of claim 12, wherein said Amberzyme configuration comprises a sequence selected from the group consisting of SEQ ID NOs 7768-9101, and 9378-9403.

19. The enzymatic nucleic acid molecule of any of claims 1-3, wherein said enzymatic nucleic acid molecule comprises between 12 and 100 bases complementary to the RNA of EGFR gene.

20. The enzymatic nucleic acid molecule of any of claims 1-3, wherein said enzymatic nucleic acid molecule comprises between 14 and 24 bases complementary to the RNA of EGFR gene.

21. The enzymatic nucleic acid molecule of any of claims 1-3, wherein said enzymatic nucleic acid molecule is chemically synthesized.

22. The antisense nucleic acid molecule of claim 4 or claim 5, wherein said antisense nucleic acid molecule is chemically synthesized.

23. The enzymatic nucleic acid molecule of any of claims 1-3, wherein said enzymatic nucleic acid molecule comprises at least one 2′-sugar modification.

24. The antisense nucleic acid molecule of claim 4, wherein said antisense nucleic acid molecule comprises at least one 2′-sugar modification.

25. The enzymatic nucleic acid molecule of any of claims 1-3, wherein said enzymatic nucleic acid molecule comprises at least one nucleic acid base modification.

26. The antisense nucleic acid molecule of claim 4, wherein said antisense nucleic acid molecule comprises at least one nucleic acid base modification.

27. The enzymatic nucleic acid molecule of any of claims 1-3, wherein said enzymatic nucleic acid molecule comprises at least one phosphate backbone modification.

28. The antisense nucleic acid molecule of claim 4, wherein said antisense nucleic acid molecule comprises at least one phosphate backbone modification.

29. A mammalian cell including the enzymatic nucleic acid molecule of any of claims 1-3.

30. The mammalian cell of claim 29, wherein said mammalian cell is a human cell.

31. A method of reducing EGFR activity in a cell, comprising the step of contacting said cell with the enzymatic nucleic acid molecule of any of claims 1-3, under conditions suitable for said reduction.

32. A method of reducing EGFR activity in a cell, comprising the step of contacting said cell with the antisense nucleic acid molecule of claim 4 or claim 5 under conditions suitable for said reduction.

33. A method of treatment of a patient having a condition associated with the level of EGFR, comprising contacting cells of said patient with the enzymatic nucleic acid molecule of any of claims 1-3, under conditions suitable for said treatment.

34. A method of treatment of a patient having a condition associated with the level of EGFR, comprising contacting cells of said patient with the antisense nucleic acid molecule of claim 4 or claim 5, under conditions suitable for said treatment.

35. The method of claim 31 further comprising the use of one or more drug therapies under conditions suitable for said treatment.

36. The method of claim 32 further comprising the use of one or more drug therapies under conditions suitable for said treatment.

37. The method of claim 33 further comprising the use of one or more drug therapies under conditions suitable for said treatment.

38. The method of claim 34 further comprising the use of one or more drug therapies under conditions suitable for said treatment.

39. A method of cleaving RNA of EGFR gene comprising the step of contacting an enzymatic nucleic acid molecule of any of claims 1-3 with said RNA of EGFR gene under conditions suitable for the cleavage.

40. The method of claim 39, wherein said cleavage is carried out in the presence of a divalent cation.

41. The method of claim 40, wherein said divalent cation is Mg²⁺.

42. The enzymatic nucleic acid molecule of any of claims 1-3, wherein said enzymatic nucleic acid comprises a cap structure, wherein the cap structure is at the 5′-end, or 3′-end, or both the 5′-end and the 3′-end.

43. The antisense nucleic acid molecule of claim 4 or claim 5, wherein said antisense nucleic acid comprises a cap structure, wherein the cap structure is at the 5′-end, or 3′-end, or both the 5′-end and the 3′-end.

44. The enzymatic nucleic acid molecule of claim 42, wherein the cap structure at the 5′-end, 3′-end, or both the 5′-end and the 3′-end comprises a 3′,3′-linked or 5′,5′-linked deoxyabasic ribose derivative.

45. The antisense nucleic acid molecule of claim 43, wherein the cap structure at the 5′-end, 3′-end, or both the 5′-end and the 3′-end comprises a 3′,3′-linked or 5′,5′-linked deoxyabasic ribose derivative.

46. The method of claim 31, wherein said enzymatic nucleic acid molecule is in a Zinzyme configuration.

47. An expression vector comprising a nucleic acid sequence encoding at least one enzymatic nucleic acid molecule of claim 1 or claim 3 in a manner which allows expression of the nucleic acid molecule.

48. A mammalian cell including an expression vector of claim 47.

49. The mammalian cell of claim 48, wherein said mammalian cell is a human cell.

50. The expression vector of claim 47, wherein said enzymatic nucleic acid molecule is in a hammerhead configuration.

51. The expression vector of claim 47, wherein said expression vector further comprises a sequence for an antisense nucleic acid molecule complementary to the RNA of EGFR gene.

52. The expression vector of claim 47, wherein said expression vector comprises a nucleic acid sequence encoding two or more of said enzymatic nucleic acid molecules, which may be the same or different.

53. The expression vector of claim 52, wherein said expression vector further comprises a sequence encoding an antisense nucleic acid molecule complementary to the RNA of EGFR gene.

54. A method for treatment of cancer comprising the step of administering to a patient the enzymatic nucleic acid molecule of any of claims 1-3 under conditions suitable for said treatment.

55. The method of claim 54, wherein said cancer is breast cancer, lung cancer, prostate cancer, colorectal cancer, brain cancer, esophageal cancer, stomach cancer, bladder cancer, pancreatic cancer, cervical cancer, head and neck cancer, ovarian cancer, melanoma, lymphoma, glioma, or multidrug resistant cancer.

56. A method for treatment of cancer comprising the step of administering to a patient the antisense nucleic acid molecule of claim 4 or claim 5 under conditions suitable for said treatment.

57. The method of claim 56, wherein said cancer is breast cancer, lung cancer, prostate cancer, colorectal cancer, brain cancer, esophageal cancer, stomach cancer, bladder cancer, pancreatic cancer, cervical cancer, head and neck cancer, ovarian cancer, melanoma, lymphoma, glioma, or multidrug resistant cancer.

58. The method of claim 54, wherein said enzymatic nucleic acid molecule is in a Zinzyme configuration.

59. The method of claim 54, wherein said method further comprises administering to said patient one or more other therapies.

60. The method of claim 56, wherein said method further comprises administering to said patient one or more other therapies.

61. The nucleic acid molecule of claim 1 or claim 3, wherein said nucleic acid molecule comprises at least five ribose residues, at least ten 2′-O-methyl modifications, and a 3′-end modification.

62. The nucleic acid molecule of claim 61, wherein said nucleic acid molecule further comprises phosphorothioate linkages on at least three of the 5′ terminal nucleotides.

63. The nucleic acid molecule of claim 61, wherein said 3′-end modification is a 3′-3′ inverted abasic moiety.

64. The method of claim 35 wherein said other drug therapies are monoclonal antibodies, EGFR-specific tyrosine kinase inhibitors, or chemotherapy.

65. The method of claim 64, wherein said monoclonal antibodies comprise mAB IMC C225 and mAB ABX-EGF.

66. The method of claim 64, wherein said EGFR-specific tyrosine kinase inhibitors comprise OSI-774 and ZD1839.

67. The method of claim 64, wherein said chemotherapy is paclitaxel, docetaxel, cisplatin, methotrexate, cyclophosphamide, doxorubin, fluorouracil carboplatin, edatrexate, gemcitabine, or vinorelbine.

68. The method of claim 36 wherein said other drug therapies are monoclonal antibodies, EGFR-specific tyrosine kinase inhibitors, or chemotherapy.

69. The method of claim 68, wherein said monoclonal antibodies comprise mAB IMC C225 and mAB ABX-EGF.

70. The method of claim 68, wherein said EGFR-specific tyrosine kinase inhibitors comprise OSI-774 and ZD1839.

71. The method of claim 68, wherein said chemotherapy is paclitaxel, docetaxel, cisplatin, methotrexate, cyclophosphamide, doxorubin, fluorouracil carboplatin, edatrexate, gemcitabine, or vinorelbine.

72. The method of claim 37 wherein said other drug therapies are monoclonal antibodies, EGFR-specific tyrosine kinase inhibitors, or chemotherapy.

73. The method of claim 72, wherein said monoclonal antibodies comprise mAB IMC C225 and mAB ABX-EGF.

74. The method of claim 72, wherein said EGFR-specific tyrosine kinase inhibitors comprise OSI-774 and ZD1839.

75. The method of claim 72, wherein said chemotherapy is paclitaxel, docetaxel, cisplatin, methotrexate, cyclophosphamide, doxorubin, fluorouracil carboplatin, edatrexate, gemcitabine, or vinorelbine.

76. The method of claim 38 wherein said other drug therapies are monoclonal antibodies, EGFR-specific tyrosine kinase inhibitors, or chemotherapy.

77. The method of claim 76, wherein said monoclonal antibodies comprise mAB IMC C225 and mAB ABX-EGF.

78. The method of claim 76, wherein said EGFR-specific tyrosine kinase inhibitors comprise OSI-774 and ZD1839.

79. The method of claim 76, wherein said chemotherapy is paclitaxel, docetaxel, cisplatin, methotrexate, cyclophosphamide, doxorubin, fluorouracil carboplatin, edatrexate, gemcitabine, or vinorelbine.

80. The method of claim 59, wherein said other therapies are monoclonal antibodies, EGFR-specific tyrosine kinase inhibitors (TKIs), chemotherapy, or radiation therapy.

81. The method of claim 80, wherein said monoclonal antibodies comprise mAB IMC C225 and mAB ABX-EGF.

82. The method of claim 80, wherein said EGFR-specific tyrosine kinase inhibitors comprise OSI-774 and ZD1839.

83. The method of claim 80, wherein said chemotherapy is paclitaxel, docetaxel, cisplatin, methotrexate, cyclophosphamide, doxorubin, fluorouracil carboplatin, edatrexate, gemcitabine, or vinorelbine.

84. The method of claim 60, wherein said other therapies are monoclonal antibodies, EGFR-specific tyrosine kinase inhibitors (TKIs), chemotherapy, or radiation therapy.

85. The method of claim 84, wherein said monoclonal antibodies comprise mAB IMC C225 and mAB ABX-EGF.

86. The method of claim 84, wherein said EGFR-specific tyrosine kinase inhibitors comprise OSI-774 and ZD1839.

87. The method of claim 84, wherein said chemotherapy is paclitaxel, docetaxel, cisplatin, methotrexate, cyclophosphamide, doxorubin, fluorouracil carboplatin, edatrexate, gemcitabine, or vinorelbine.

88. A nucleic acid molecule which down regulates expression of both an epidermal growth factor receptor (EGFR) gene and a HER2 gene.

89. The nucleic acid of claim 88, wherein said nucleic acid molecule is adapted to treat cancer.

90. The nucleic acid molecule of claim 89, wherein the cancer is breast cancer, lung cancer, prostate cancer, colorectal cancer, brain cancer, esophageal cancer, stomach cancer, bladder cancer, pancreatic cancer, cervical cancer, head and neck cancer, ovarian cancer, melanoma, lymphoma, glioma, or multidrug resistant cancer.

91. The nucleic acid molecule of claim 88, wherein said nucleic acid molecule is an enzymatic nucleic acid molecule having at least one binding arm.

92. The nucleic acid molecule of claim 91, wherein said enzymatic nucleic acid molecule has an endonuclease activity to cleave RNA encoded by both an epidermal growth factor receptor (EGFR) and a HER2 gene.

93. The nucleic acid of claim 91, wherein one or more binding arms of the enzymatic nucleic acid molecule comprises a sequence complementary to a sequence having SEQ ID NOs. 325, 346, 1516, 2494, 2916, 3518, 9128, 9254, 9627, 9628, 9629, 9630, or 9631.

94. An enzymatic nucleic acid molecule comprising a sequence having SEQ ID NOs. 4102, 4123, 5292, 6271, 7183, 7215, 7216, 7217, 8594, 8595, 9383, 9406, 9407, 9463, or 9513.

95. The nucleic acid molecule of claim 88, wherein said nucleic acid molecule is an antisense nucleic acid molecule.

96. An antisense nucleic acid molecule comprising a sequence complementary to a sequence having SEQ ID NOs. 325, 346, 1516, 2494, 2916, 3518, 9128, 9254, 9627, 9628, 9629, 9630, or 9631.

97. The enzymatic nucleic acid molecule of claim 92, wherein said enzymatic nucleic acid molecule is in a hammerhead (HH) configuration.

98. The enzymatic nucleic acid molecule of claim 92, wherein said enzymatic nucleic acid molecule is in a hairpin, hepatitis Delta virus, group I intron, VS nucleic acid, amberzyme, zinzyme or RNAse P nucleic acid configuration.

99. The enzymatic nucleic acid molecule of claim 4, wherein said enzymatic nucleic acid molecule is in a NCH configuration.

100. The enzymatic nucleic acid molecule of claim 4, wherein said enzymatic nucleic acid molecule is in a G-cleaver configuration.

101. The enzymatic nucleic acid molecule of claim 4, wherein said enzymatic nucleic acid molecule is a DNAzyme.

102. The nucleic acid molecule of claim 88, wherein said nucleic acid molecule comprises between 12 and 100 bases complementary to the RNA of both EGFR and HER2 genes.

103. The nucleic acid molecule of claim 88, wherein said nucleic acid molecule comprises between 14 and 24 bases complementary to the RNA of EGFR and HER2 genes.

104. The nucleic acid molecule of claim 88, wherein said nucleic acid molecule is chemically synthesized.

105. The nucleic acid molecule of claim 88, wherein said nucleic acid molecule comprises at least one 2′-sugar modification.

106. The nucleic acid molecule of claim 88, wherein said nucleic acid molecule comprises at least one nucleic acid base modification.

107. The nucleic acid molecule of claim 88, wherein said nucleic acid molecule comprises at least one phosphate backbone modification.

108. A mammalian cell including the nucleic acid molecule of claim 88.

109. The mammalian cell of claim 108, wherein said mammalian cell is a human cell.

110. A method of reducing EGFR and HER2 activity in a cell, comprising the step of contacting said cell with a nucleic acid molecule of claim 1, under conditions suitable for said reduction.

111. A method of treatment of a patient having a condition associated with the level of EGFR and HER2, comprising contacting cells of said patient with a nucleic acid molecule of claim 1, under conditions suitable for said treatment.

112. The method of claim 111 further comprising the use of one or more drug therapies under conditions suitable for the treatment.

113. A method of cleaving RNA of both EGFR and HER2 genes comprising the step of contacting a nucleic acid molecule of claim 91 with said RNA under conditions suitable for the cleavage of said RNA.

114. The method of claim 113, wherein said cleavage is carried out in the presence of a divalent cation.

115. The method of claim 114, wherein said divalent cation is Mg²⁺.

116. The nucleic acid molecule of claim 88, wherein said nucleic acid comprises a cap structure, wherein the cap structure is at the 5′-end, 3′-end, or both the 5′-end and the 3′-end.

117. The method of claim 110, wherein said nucleic acid molecule is an enzymatic nucleic acid molecule.

118. The method of claim 117, wherein said enzymatic nucleic acid molecule is in a hammerhead configuration.

119. The method of claim 117, wherein said enzymatic nucleic acid molecule is a DNAzyme.

120. The method of claim 110, wherein said nucleic acid molecule is an antisense nucleic acid molecule.

121. An expression vector comprising a nucleic acid sequence encoding at least one nucleic acid molecule of claim 88 in a manner which allows expression of the nucleic acid molecule.

122. A mammalian cell including an expression vector of claim 121.

123. The mammalian cell of claim 122, wherein said mammalian cell is a human cell.

124. The expression vector of claim 121, wherein said nucleic acid molecule is an enzymatic nucleic acid molecule.

125. The expression vector of claim 121, wherein said nucleic acid molecule is an antisense nucleic acid molecule.

126. The expression vector of claim 121, wherein said expression vector further comprises a sequence for an antisense nucleic acid molecule complementary to the RNA of both EGFR and HER2 genes.

127. The expression vector of claim 121, wherein said expression vector further comprises a nucleic acid sequence encoding two or more of said nucleic acid molecules, which may be the same or different.

128. The expression vector of claim 127, wherein said expression vector comprises a sequence encoding antisense nucleic acid molecule complementary to the RNA of both EGFR and HER2 genes.

129. A method for treatment cancer comprising the step of administering to a patient the nucleic acid molecule of claim 88 under conditions suitable for said treatment.

130. The method of claim 129, wherein said cancer is breast cancer, lung cancer, prostate cancer, colorectal cancer, brain cancer, esophageal cancer, stomach cancer, bladder cancer, pancreatic cancer, cervical cancer, head and neck cancer, ovarian cancer, melanoma, lymphoma, glioma, or multidrug resistant cancer.

131. The method of claim 129, wherein said nucleic acid molecule is in a hammerhead configuration.

132. The method of claim 129. wherein said method further comprises administering to said patient one or more other therapies.

133. The nucleic acid molecule of claim 88, wherein said nucleic acid molecule comprises at least five ribose residues, at least ten 2′-O-methyl modifications, and a 3′-end modification.

134. The nucleic acid molecule of claim 131, wherein said nucleic acid molecule further comprises phosphorothioate linkages on at least three of the 5′ terminal nucleotides.

135. The nucleic acid molecule of claim 131, wherein said 3′-end modification is 3′-3′ inverted abasic moiety.

136. The method of claim 119, wherein said DNAzyme comprises at least ten 2′-O-methyl modifications and a 3′-end modification.

137. The method of claim 136, wherein said DNAzyme further comprises phosphorothioate linkages on at least three of the 5′ terminal nucleotides.

138. The method of claim 136, wherein said 3′-end modification is 3′-3′ inverted abasic moiety.

139. The method of claim 132, wherein said other therapies are monoclonal antibodies, EGFR-specific tyrosine kinase inhibitors (TKIs), chemotherapy, or radiation therapy.

140. The method of claim 139, wherein said monoclonal antibodies comprise mAB IMC C225 and mAB ABX-EGF.

141. The method of claim 139, wherein said EGFR-specific tyrosine kinase inhibitors comprise OSI-774 and ZD1839.

142. The method of claim 139, wherein said chemotherapy is paclitaxel, docetaxel, cisplatin, methotrexate, cyclophosphamide, doxorubin, fluorouracil carboplatin, edatrexate, gemcitabine, or vinorelbine.

143. A pharmaceutical composition comprising an enzymatic nucleic acid molecule of any of claims 1-3.

144. A pharmaceutical composition comprising an antisense nucleic acid molecule of claim 4 or claim 5.

145. A pharmaceutical composition comprising an enzymatic nucleic acid molecule of claim 88.

The application's sequence listing, which the Patent Office published only in electronic form, follows.

SEQUENCE LISTING (9645 sequences)

SEQ ID NO: 1 - RNA, 17 nt, Homo sapiens
gccggagucccgagcua

SEQ ID NO: 2 - RNA, 17 nt, Homo sapiens
cccgagcuagccccggc

SEQ ID NO: 3 - RNA, 17 nt, Homo sapiens
ggccaccucgucggcgu

SEQ ID NO: 4 - RNA, 17 nt, Homo sapiens
caccucgucggcguccg

SEQ ID NO: 5 - RNA, 17 nt, Homo sapiens
gucggcguccgcccgag

SEQ ID NO: 6 - RNA, 17 nt, Homo sapiens
gcccgaguccccgccuc

SEQ ID NO: 7 - RNA, 17 nt, Homo sapiens
ccccgccucgccgccaa

SEQ ID NO: 8 - RNA, 17 nt, Homo sapiens
cccugacuccguccagu

SEQ ID NO: 9 - RNA, 17 nt, Homo sapiens
gacuccguccaguauug

SEQ ID NO: 10 - RNA, 17 nt, Homo sapiens
cguccaguauugaucgg

SEQ ID NO: 11 - RNA, 17 nt, Homo sapiens
uccaguauugaucggga

SEQ ID NO: 12 - RNA, 17 nt, Homo sapiens
guauugaucgggagagc

SEQ ID NO: 13 - RNA, 17 nt, Homo sapiens
agcgagcucuucgggga

SEQ ID NO: 14 - RNA, 17 nt, Homo sapiens
cgagcucuucggggagc

SEQ ID NO: 15 - RNA, 17 nt, Homo sapiens
gagcucuucggggagca

SEQ ID NO: 16 - RNA, 17 nt, Homo sapiens
gcgacccuccgggacgg

SEQ ID NO: 17 - RNA, 17 nt, Homo sapiens
gcagcgcuccuggcgcu

SEQ ID NO: 18 - RNA, 17 nt, Homo sapiens
gcugcgcucugcccggc

SEQ ID NO: 19 - RNA, 17 nt, Homo sapiens
cggcgagucgggcucug

SEQ ID NO: 20 - RNA, 17 nt, Homo sapiens
gucgggcucuggaggaa

SEQ ID NO: 21 - RNA, 17 nt, Homo sapiens
aagaaaguuugccaagg

SEQ ID NO: 22 - RNA, 17 nt, Homo sapiens
agaaaguuugccaaggc

SEQ ID NO: 23 - RNA, 17 nt, Homo sapiens
gcacgaguaacaagcuc

SEQ ID NO: 24 - RNA, 17 nt, Homo sapiens
aacaagcucacgcaguu

SEQ ID NO: 25 - RNA, 17 nt, Homo sapiens
cacgcaguugggcacuu

SEQ ID NO: 26 - RNA, 17 nt, Homo sapiens
ugggcacuuuugaagau

SEQ ID NO: 27 - RNA, 17 nt, Homo sapiens
gggcacuuuugaagauc

SEQ ID NO: 28 - RNA, 17 nt, Homo sapiens
ggcacuuuugaagauca

SEQ ID NO: 29 - RNA, 17 nt, Homo sapiens
uugaagaucauuuucuc

SEQ ID NO: 30 - RNA, 17 nt, Homo sapiens
aagaucauuuucucagc

SEQ ID NO: 31 - RNA, 17 nt, Homo sapiens
agaucauuuucucagcc

SEQ ID NO: 32 - RNA, 17 nt, Homo sapiens
gaucauuuucucagccu

SEQ ID NO: 33 - RNA, 17 nt, Homo sapiens
aucauuuucucagccuc

SEQ ID NO: 34 - RNA, 17 nt, Homo sapiens
cauuuucucagccucca

SEQ ID NO: 35 - RNA, 17 nt, Homo sapiens
cucagccuccagaggau

SEQ ID NO: 36 - RNA, 17 nt, Homo sapiens
gaggauguucaauaacu

SEQ ID NO: 37 - RNA, 17 nt, Homo sapiens
aggauguucaauaacug

SEQ ID NO: 38 - RNA, 17 nt, Homo sapiens
uguucaauaacugugag

SEQ ID NO: 39 - RNA, 17 nt, Homo sapiens
gaggugguccuugggaa

SEQ ID NO: 40 - RNA, 17 nt, Homo sapiens
gugguccuugggaauuu

SEQ ID NO: 41 - RNA, 17 nt, Homo sapiens
uugggaauuuggaaauu

SEQ ID NO: 42 - RNA, 17 nt, Homo sapiens
ugggaauuuggaaauua

SEQ ID NO: 43 - RNA, 17 nt, Homo sapiens
uuggaaauuaccuaugu

SEQ ID NO: 44 - RNA, 17 nt, Homo sapiens
uggaaauuaccuaugug

SEQ ID NO: 45 - RNA, 17 nt, Homo sapiens
aauuaccuaugugcaga

SEQ ID NO: 46 - RNA, 17 nt, Homo sapiens
agaggaauuaugaucuu

SEQ ID NO: 47 - RNA, 17 nt, Homo sapiens
gaggaauuaugaucuuu

SEQ ID NO: 48 - RNA, 17 nt, Homo sapiens
auuaugaucuuuccuuc

SEQ ID NO: 49 - RNA, 17 nt, Homo sapiens
uaugaucuuuccuucuu

SEQ ID NO: 50 - RNA, 17 nt, Homo sapiens
augaucuuuccuucuua

SEQ ID NO: 51 - RNA, 17 nt, Homo sapiens
ugaucuuuccuucuuaa

SEQ ID NO: 52 - RNA, 17 nt, Homo sapiens
ucuuuccuucuuaaaga

SEQ ID NO: 53 - RNA, 17 nt, Homo sapiens
cuuuccuucuuaaagac

SEQ ID NO: 54 - RNA, 17 nt, Homo sapiens
uuccuucuuaaagacca

SEQ ID NO: 55 - RNA, 17 nt, Homo sapiens
uccuucuuaaagaccau

SEQ ID NO: 56 - RNA, 17 nt, Homo sapiens
aagaccauccaggaggu

SEQ ID NO: 57 - RNA, 17 nt, Homo sapiens
uggcugguuauguccuc

SEQ ID NO: 58 - RNA, 17 nt, Homo sapiens
ggcugguuauguccuca

SEQ ID NO: 59 - RNA, 17 nt, Homo sapiens
gguuauguccucauugc

SEQ ID NO: 60 - RNA, 17 nt, Homo sapiens
uauguccucauugcccu

SEQ ID NO: 61 - RNA, 17 nt, Homo sapiens
guccucauugcccucaa

SEQ ID NO: 62 - RNA, 17 nt, Homo sapiens
auugcccucaacacagu

SEQ ID NO: 63 - RNA, 17 nt, Homo sapiens
gagcgaauuccuuugga

SEQ ID NO: 64 - RNA, 17 nt, Homo sapiens
agcgaauuccuuuggaa

SEQ ID NO: 65 - RNA, 17 nt, Homo sapiens
gaauuccuuuggaaaac

SEQ ID NO: 66 - RNA, 17 nt, Homo sapiens
aauuccuuuggaaaacc

SEQ ID NO: 67 - RNA, 17 nt, Homo sapiens
cugcagaucaucagagg

SEQ ID NO: 68 - RNA, 17 nt, Homo sapiens
cagaucaucagaggaaa

SEQ ID NO: 69 - RNA, 17 nt, Homo sapiens
gaggaaauauguacuac

SEQ ID NO: 70 - RNA, 17 nt, Homo sapiens
aaauauguacuacgaaa

SEQ ID NO: 71 - RNA, 17 nt, Homo sapiens
uauguacuacgaaaauu

SEQ ID NO: 72 - RNA, 17 nt, Homo sapiens
acgaaaauuccuaugcc

SEQ ID NO: 73 - RNA, 17 nt, Homo sapiens
cgaaaauuccuaugccu

SEQ ID NO: 74 - RNA, 17 nt, Homo sapiens
aaauuccuaugccuuag

SEQ ID NO: 75 - RNA, 17 nt, Homo sapiens
cuaugccuuagcagucu

SEQ ID NO: 76 - RNA, 17 nt, Homo sapiens
uaugccuuagcagucuu

SEQ ID NO: 77 - RNA, 17 nt, Homo sapiens
uuagcagucuuaucuaa

SEQ ID NO: 78 - RNA, 17 nt, Homo sapiens
agcagucuuaucuaacu

SEQ ID NO: 79 - RNA, 17 nt, Homo sapiens
gcagucuuaucuaacua

SEQ ID NO: 80 - RNA, 17 nt, Homo sapiens
agucuuaucuaacuaug

SEQ ID NO: 81 - RNA, 17 nt, Homo sapiens
ucuuaucuaacuaugau

SEQ ID NO: 82 - RNA, 17 nt, Homo sapiens
aucuaacuaugaugcaa

SEQ ID NO: 83 - RNA, 17 nt, Homo sapiens
augcaaauaaaaccgga

SEQ ID NO: 84 - RNA, 17 nt, Homo sapiens
ugagaaauuuacaggaa

SEQ ID NO: 85 - RNA, 17 nt, Homo sapiens
gagaaauuuacaggaaa

SEQ ID NO: 86 - RNA, 17 nt, Homo sapiens
agaaauuuacaggaaau

SEQ ID NO: 87 - RNA, 17 nt, Homo sapiens
caggaaauccugcaugg

SEQ ID NO: 88 - RNA, 17 nt, Homo sapiens
cgugcgguucagcaaca

SEQ ID NO: 89 - RNA, 17 nt, Homo sapiens
gugcgguucagcaacaa

SEQ ID NO: 90 - RNA, 17 nt, Homo sapiens
gagagcauccaguggcg

SEQ ID NO: 91 - RNA, 17 nt, Homo sapiens
cgggacauagucagcag

SEQ ID NO: 92 - RNA, 17 nt, Homo sapiens
gacauagucagcaguga

SEQ ID NO: 93 - RNA, 17 nt, Homo sapiens
cagugacuuucucagca

SEQ ID NO: 94 - RNA, 17 nt, Homo sapiens
agugacuuucucagcaa

SEQ ID NO: 95 - RNA, 17 nt, Homo sapiens
gugacuuucucagcaac

SEQ ID NO: 96 - RNA, 17 nt, Homo sapiens
gacuuucucagcaacau

SEQ ID NO: 97 - RNA, 17 nt, Homo sapiens
caacaugucgauggacu

SEQ ID NO: 98 - RNA, 17 nt, Homo sapiens
gauggacuuccagaacc

SEQ ID NO: 99 - RNA, 17 nt, Homo sapiens
auggacuuccagaacca

SEQ ID NO: 100 - RNA, 17 nt, Homo sapiens
agugugauccaagcugu

SEQ ID NO: 101 - RNA, 17 nt, Homo sapiens
caagcugucccaauggg

SEQ ID NO: 102 - RNA, 17 nt, Homo sapiens
accaaaaucaucugugc

SEQ ID NO: 103 - RNA, 17 nt, Homo sapiens
aaaaucaucugugccca

SEQ ID NO: 104 - RNA, 17 nt, Homo sapiens
gcagugcuccgggcgcu

SEQ ID NO: 105 - RNA, 17 nt, Homo sapiens
uggcaagucccccagug

SEQ ID NO: 106 - RNA, 17 nt, Homo sapiens
ugccuggucugccgcaa

SEQ ID NO: 107 - RNA, 17 nt, Homo sapiens
ccgcaaauuccgagacg

SEQ ID NO: 108 - RNA, 17 nt, Homo sapiens
cgcaaauuccgagacga

SEQ ID NO: 109 - RNA, 17 nt, Homo sapiens
cccccacucaugcucua

SEQ ID NO: 110 - RNA, 17 nt, Homo sapiens
cucaugcucuacaaccc

SEQ ID NO: 111 - RNA, 17 nt, Homo sapiens
caugcucuacaacccca

SEQ ID NO: 112 - RNA, 17 nt, Homo sapiens
caccacguaccagaugg

SEQ ID NO: 113 - RNA, 17 nt, Homo sapiens
gggcaaauacagcuuug

SEQ ID NO: 114 - RNA, 17 nt, Homo sapiens
auacagcuuuggugcca

SEQ ID NO: 115 - RNA, 17 nt, Homo sapiens
uacagcuuuggugccac

SEQ ID NO: 116 - RNA, 17 nt, Homo sapiens
agaaguguccccguaau

SEQ ID NO: 117 - RNA, 17 nt, Homo sapiens
guccccguaauuaugug

SEQ ID NO: 118 - RNA, 17 nt, Homo sapiens
cccguaauuauguggug

SEQ ID NO: 119 - RNA, 17 nt, Homo sapiens
ccguaauuaugugguga

SEQ ID NO: 120 - RNA, 17 nt, Homo sapiens
ugacagaucacggcucg

SEQ ID NO: 121 - RNA, 17 nt, Homo sapiens
ucacggcucgugcgucc

SEQ ID NO: 122 - RNA, 17 nt, Homo sapiens
ucgugcguccgagccug

SEQ ID NO: 123 - RNA, 17 nt, Homo sapiens
cgacagcuaugagaugg

SEQ ID NO: 124 - RNA, 17 nt, Homo sapiens
gacggcguccgcaagug

SEQ ID NO: 125 - RNA, 17 nt, Homo sapiens
gcaaguguaagaagugc

SEQ ID NO: 126 - RNA, 17 nt, Homo sapiens
aagggccuugccgcaaa

SEQ ID NO: 127 - RNA, 17 nt, Homo sapiens
aaguguguaacggaaua

SEQ ID NO: 128 - RNA, 17 nt, Homo sapiens
aacggaauagguauugg

SEQ ID NO: 129 - RNA, 17 nt, Homo sapiens
gaauagguauuggugaa

SEQ ID NO: 130 - RNA, 17 nt, Homo sapiens
auagguauuggugaauu

SEQ ID NO: 131 - RNA, 17 nt, Homo sapiens
uggugaauuuaaagacu

SEQ ID NO: 132 - RNA, 17 nt, Homo sapiens
ggugaauuuaaagacuc

SEQ ID NO: 133 - RNA, 17 nt, Homo sapiens
gugaauuuaaagacuca

SEQ ID NO: 134 - RNA, 17 nt, Homo sapiens
uaaagacucacucucca

SEQ ID NO: 135 - RNA, 17 nt, Homo sapiens
gacucacucuccauaaa

SEQ ID NO: 136 - RNA, 17 nt, Homo sapiens
cucacucuccauaaaug

SEQ ID NO: 137 - RNA, 17 nt, Homo sapiens
cucuccauaaaugcuac

SEQ ID NO: 138 - RNA, 17 nt, Homo sapiens
uaaaugcuacgaauauu

SEQ ID NO: 139 - RNA, 17 nt, Homo sapiens
cuacgaauauuaaacac

SEQ ID NO: 140 - RNA, 17 nt, Homo sapiens
acgaauauuaaacacuu

SEQ ID NO: 141 - RNA, 17 nt, Homo sapiens
cgaauauuaaacacuuc

SEQ ID NO: 142 - RNA, 17 nt, Homo sapiens
uaaacacuucaaaaacu

SEQ ID NO: 143 - RNA, 17 nt, Homo sapiens
aaacacuucaaaaacug

SEQ ID NO: 144 - RNA, 17 nt, Homo sapiens
cugcaccuccaucagug

SEQ ID NO: 145 - RNA, 17 nt, Homo sapiens
accuccaucaguggcga

SEQ ID NO: 146 - RNA, 17 nt, Homo sapiens
guggcgaucuccacauc

SEQ ID NO: 147 - RNA, 17 nt, Homo sapiens
ggcgaucuccacauccu

SEQ ID NO: 148 - RNA, 17 nt, Homo sapiens
cuccacauccugccggu

SEQ ID NO: 149 - RNA, 17 nt, Homo sapiens
gguggcauuuaggggug

SEQ ID NO: 150 - RNA, 17 nt, Homo sapiens
guggcauuuagggguga

SEQ ID NO: 151 - RNA, 17 nt, Homo sapiens
uggcauuuaggggugac

SEQ ID NO: 152 - RNA, 17 nt, Homo sapiens
gggugacuccuucacac

SEQ ID NO: 153 - RNA, 17 nt, Homo sapiens
ugacuccuucacacaua

SEQ ID NO: 154 - RNA, 17 nt, Homo sapiens
gacuccuucacacauac

SEQ ID NO: 155 - RNA, 17 nt, Homo sapiens
ucacacauacuccuccu

SEQ ID NO: 156 - RNA, 17 nt, Homo sapiens
cacauacuccuccucug

SEQ ID NO: 157 - RNA, 17 nt, Homo sapiens
auacuccuccucuggau

SEQ ID NO: 158 - RNA, 17 nt, Homo sapiens
cuccuccucuggaucca

SEQ ID NO: 159 - RNA, 17 nt, Homo sapiens
cucuggauccacaggaa

SEQ ID NO: 160 - RNA, 17 nt, Homo sapiens
aacuggauauucugaaa

SEQ ID NO: 161 - RNA, 17 nt, Homo sapiens
cuggauauucugaaaac

SEQ ID NO: 162 - RNA, 17 nt, Homo sapiens
uggauauucugaaaacc

SEQ ID NO: 163 - RNA, 17 nt, Homo sapiens
aaaaccguaaaggaaau

SEQ ID NO: 164 - RNA, 17 nt, Homo sapiens
aaggaaaucacaggguu

SEQ ID NO: 165 - RNA, 17 nt, Homo sapiens
cacaggguuuuugcuga

SEQ ID NO: 166 - RNA, 17 nt, Homo sapiens
acaggguuuuugcugau

SEQ ID NO: 167 - RNA, 17 nt, Homo sapiens
caggguuuuugcugauu

SEQ ID NO: 168 - RNA, 17 nt, Homo sapiens
aggguuuuugcugauuc

SEQ ID NO: 169 - RNA, 17 nt, Homo sapiens
uugcugauucaggcuug

SEQ ID NO: 170 - RNA, 17 nt, Homo sapiens
ugcugauucaggcuugg

SEQ ID NO: 171 - RNA, 17 nt, Homo sapiens
uucaggcuuggccugaa

SEQ ID NO: 172 - RNA, 17 nt, Homo sapiens
acggaccuccaugccuu

SEQ ID NO: 173 - RNA, 17 nt, Homo sapiens
ccaugccuuugagaacc

SEQ ID NO: 174 - RNA, 17 nt, Homo sapiens
caugccuuugagaaccu

SEQ ID NO: 175 - RNA, 17 nt, Homo sapiens
gagaaccuagaaaucau

SEQ ID NO: 176 - RNA, 17 nt, Homo sapiens
cuagaaaucauacgcgg

SEQ ID NO: 177 - RNA, 17 nt, Homo sapiens
gaaaucauacgcggcag

SEQ ID NO: 178 - RNA, 17 nt, Homo sapiens
aacauggucaguuuucu

SEQ ID NO: 179 - RNA, 17 nt, Homo sapiens
uggucaguuuucucuug

SEQ ID NO: 180 - RNA, 17 nt, Homo sapiens
ggucaguuuucucuugc

SEQ ID NO: 181 - RNA, 17 nt, Homo sapiens
gucaguuuucucuugca

SEQ ID NO: 182 - RNA, 17 nt, Homo sapiens
ucaguuuucucuugcag

SEQ ID NO: 183 - RNA, 17 nt, Homo sapiens
aguuuucucuugcaguc

SEQ ID NO: 184 - RNA, 17 nt, Homo sapiens
uuuucucuugcagucgu

SEQ ID NO: 185 - RNA, 17 nt, Homo sapiens
cuugcagucgucagccu

SEQ ID NO: 186 - RNA, 17 nt, Homo sapiens
gcagucgucagccugaa

SEQ ID NO: 187 - RNA, 17 nt, Homo sapiens
cugaacauaacauccuu

SEQ ID NO: 188 - RNA, 17 nt, Homo sapiens
cauaacauccuugggau

SEQ ID NO: 189 - RNA, 17 nt, Homo sapiens
aacauccuugggauuac

SEQ ID NO: 190 - RNA, 17 nt, Homo sapiens
cuugggauuacgcuccc

SEQ ID NO: 191 - RNA, 17 nt, Homo sapiens
uugggauuacgcucccu

SEQ ID NO: 192 - RNA, 17 nt, Homo sapiens
auuacgcucccucaagg

SEQ ID NO: 193 - RNA, 17 nt, Homo sapiens
cgcucccucaaggagau

SEQ ID NO: 194 - RNA, 17 nt, Homo sapiens
aaggagauaagugaugg

SEQ ID NO: 195 - RNA, 17 nt, Homo sapiens
gaugugauaauuucagg

SEQ ID NO: 196 - RNA, 17 nt, Homo sapiens
gugauaauuucaggaaa

SEQ ID NO: 197 - RNA, 17 nt, Homo sapiens
ugauaauuucaggaaac

SEQ ID NO: 198 - RNA, 17 nt, Homo sapiens
gauaauuucaggaaaca

SEQ ID NO: 199 - RNA, 17 nt, Homo sapiens
acaaaaauuugugcuau

SEQ ID NO: 200 - RNA, 17 nt, Homo sapiens
caaaaauuugugcuaug

SEQ ID NO: 201 - RNA, 17 nt, Homo sapiens
uuugugcuaugcaaaua

SEQ ID NO: 202 - RNA, 17 nt, Homo sapiens
augcaaauacaauaaac

SEQ ID NO: 203 - RNA, 17 nt, Homo sapiens
aauacaauaaacuggaa

SEQ ID NO: 204 - RNA, 17 nt, Homo sapiens
aaaacuguuugggaccu

SEQ ID NO: 205 - RNA, 17 nt, Homo sapiens
aaacuguuugggaccuc

SEQ ID NO: 206 - RNA, 17 nt, Homo sapiens
ugggaccuccggucaga

SEQ ID NO: 207 - RNA, 17 nt, Homo sapiens
ccuccggucagaaaacc

SEQ ID NO: 208 - RNA, 17 nt, Homo sapiens
accaaaauuauaagcaa

SEQ ID NO: 209 - RNA, 17 nt, Homo sapiens
ccaaaauuauaagcaac

SEQ ID NO: 210 - RNA, 17 nt, Homo sapiens
aaaauuauaagcaacag

SEQ ID NO: 211 - RNA, 17 nt, Homo sapiens
ggccaggucugccaugc

SEQ ID NO: 212 - RNA, 17 nt, Homo sapiens
ccaugccuugugcuccc

SEQ ID NO: 213 - RNA, 17 nt, Homo sapiens
cuugugcucccccgagg

SEQ ID NO: 214 - RNA, 17 nt, Homo sapiens
gacugcgucucuugccg

SEQ ID NO: 215 - RNA, 17 nt, Homo sapiens
cugcgucucuugccgga

SEQ ID NO: 216 - RNA, 17 nt, Homo sapiens
gcgucucuugccggaau

SEQ ID NO: 217 - RNA, 17 nt, Homo sapiens
cggaaugucagccgagg

SEQ ID NO: 218 - RNA, 17 nt, Homo sapiens
ugcaagcuucuggaggg

SEQ ID NO: 219 - RNA, 17 nt, Homo sapiens
gcaagcuucuggagggu

SEQ ID NO: 220 - RNA, 17 nt, Homo sapiens
aagggaguuuguggaga

SEQ ID NO: 221 - RNA, 17 nt, Homo sapiens
agggaguuuguggagaa

SEQ ID NO: 222 - RNA, 17 nt, Homo sapiens
ggagaacucugagugca

SEQ ID NO: 223 - RNA, 17 nt, Homo sapiens
gagugcauacagugcca

SEQ ID NO: 224 - RNA, 17 nt, Homo sapiens
gccugccucaggccaug

SEQ ID NO: 225 - RNA, 17 nt, Homo sapiens
augaacaucaccugcac

SEQ ID NO: 226 - RNA, 17 nt, Homo sapiens
acaacuguauccagugu

SEQ ID NO: 227 - RNA, 17 nt, Homo sapiens
aacuguauccagugugc

SEQ ID NO: 228 - RNA, 17 nt, Homo sapiens
ugcccacuacauugacg

SEQ ID NO: 229 - RNA, 17 nt, Homo sapiens
cacuacauugacggccc

SEQ ID NO: 230 - RNA, 17 nt, Homo sapiens
cacugcgucaagaccug

SEQ ID NO: 231 - RNA, 17 nt, Homo sapiens
gcaggagucaugggaga

SEQ ID NO: 232 - RNA, 17 nt, Homo sapiens
acccuggucuggaagua

SEQ ID NO: 233 - RNA, 17 nt, Homo sapiens
cuggaaguacgcagacg

SEQ ID NO: 234 - RNA, 17 nt, Homo sapiens
ugugccauccaaacugc

SEQ ID NO: 235 - RNA, 17 nt, Homo sapiens
cugcaccuacggaugca

SEQ ID NO: 236 - RNA, 17 nt, Homo sapiens
ggccaggucuugaaggc

SEQ ID NO: 237 - RNA, 17 nt, Homo sapiens
ccaggucuugaaggcug

SEQ ID NO: 238 - RNA, 17 nt, Homo sapiens
aaggcuguccaacgaau

SEQ ID NO: 239 - RNA, 17 nt, Homo sapiens
augggccuaagaucccg

SEQ ID NO: 240 - RNA, 17 nt, Homo sapiens
ccuaagaucccguccau

SEQ ID NO: 241 - RNA, 17 nt, Homo sapiens
gaucccguccaucgcca

SEQ ID NO: 242 - RNA, 17 nt, Homo sapiens
ccguccaucgccacugg

SEQ ID NO: 243 - RNA, 17 nt, Homo sapiens
ggggcccuccucuugcu

SEQ ID NO: 244 - RNA, 17 nt, Homo sapiens
gcccuccucuugcugcu

SEQ ID NO: 245 - RNA, 17 nt, Homo sapiens
ccuccucuugcugcugg

SEQ ID NO: 246 - RNA, 17 nt, Homo sapiens
cuggggaucggccucuu

SEQ ID NO: 247 - RNA, 17 nt, Homo sapiens
aucggccucuucaugcg

SEQ ID NO: 248 - RNA, 17 nt, Homo sapiens
cggccucuucaugcgaa

SEQ ID NO: 249 - RNA, 17 nt, Homo sapiens
ggccucuucaugcgaag

SEQ ID NO: 250 - RNA, 17 nt, Homo sapiens
cgccacaucguucggaa

SEQ ID NO: 251 - RNA, 17 nt, Homo sapiens
cacaucguucggaagcg

SEQ ID NO: 252 - RNA, 17 nt, Homo sapiens
acaucguucggaagcgc

SEQ ID NO: 253 - RNA, 17 nt, Homo sapiens
agggagcuuguggagcc

SEQ ID NO: 254 - RNA, 17 nt, Homo sapiens
uggagccucuuacaccc

SEQ ID NO: 255 - RNA, 17 nt, Homo sapiens
gagccucuuacacccag

SEQ ID NO: 256 - RNA, 17 nt, Homo sapiens
agccucuuacacccagu

SEQ ID NO: 257 - RNA, 17 nt, Homo sapiens
gagaagcucccaaccaa

SEQ ID NO: 258 - RNA, 17 nt, Homo sapiens
accaagcucucuugagg

SEQ ID NO: 259 - RNA, 17 nt, Homo sapiens
caagcucucuugaggau

SEQ ID NO: 260 - RNA, 17 nt, Homo sapiens
agcucucuugaggaucu

SEQ ID NO: 261 - RNA, 17 nt, Homo sapiens
uugaggaucuugaagga

SEQ ID NO: 262 - RNA, 17 nt, Homo sapiens
gaggaucuugaaggaaa

SEQ ID NO: 263 - RNA, 17 nt, Homo sapiens
aacugaauucaaaaaga

SEQ ID NO: 264 - RNA, 17 nt, Homo sapiens
acugaauucaaaaagau

SEQ ID NO: 265 - RNA, 17 nt, Homo sapiens
aaaaagaucaaagugcu

SEQ ID NO: 266 - RNA, 17 nt, Homo sapiens
gcugggcuccggugcgu

SEQ ID NO: 267 - RNA, 17 nt, Homo sapiens
cggugcguucggcacgg

SEQ ID NO: 268 - RNA, 17 nt, Homo sapiens
ggugcguucggcacggu

SEQ ID NO: 269 - RNA, 17 nt, Homo sapiens
cacgguguauaagggac

SEQ ID NO: 270 - RNA, 17 nt, Homo sapiens
cgguguauaagggacuc

SEQ ID NO: 271 - RNA, 17 nt, Homo sapiens
aagggacucuggauccc

SEQ ID NO: 272 - RNA, 17 nt, Homo sapiens
cucuggaucccagaagg

SEQ ID NO: 273 - RNA, 17 nt, Homo sapiens
gagaaaguuaaaauucc

SEQ ID NO: 274 - RNA, 17 nt, Homo sapiens
agaaaguuaaaauuccc

SEQ ID NO: 275 - RNA, 17 nt, Homo sapiens
guuaaaauucccgucgc

SEQ ID NO: 276 - RNA, 17 nt, Homo sapiens
uuaaaauucccgucgcu

SEQ ID NO: 277 - RNA, 17 nt, Homo sapiens
auucccgucgcuaucaa

SEQ ID NO: 278 - RNA, 17 nt, Homo sapiens
ccgucgcuaucaaggaa

SEQ ID NO: 279 - RNA, 17 nt, Homo sapiens
gucgcuaucaaggaauu

SEQ ID NO: 280 - RNA, 17 nt, Homo sapiens
caaggaauuaagagaag

SEQ ID NO: 281 - RNA, 17 nt, Homo sapiens
aaggaauuaagagaagc

SEQ ID NO: 282 - RNA, 17 nt, Homo sapiens
agcaacaucuccgaaag

SEQ ID NO: 283 - RNA, 17 nt, Homo sapiens
caacaucuccgaaagcc

SEQ ID NO: 284 - RNA, 17 nt, Homo sapiens
aaggaaauccucgauga

SEQ ID NO: 285 - RNA, 17 nt, Homo sapiens
gaaauccucgaugaagc

SEQ ID NO: 286 - RNA, 17 nt, Homo sapiens
ugaagccuacgugaugg

SEQ ID NO: 287 - RNA, 17 nt, Homo sapiens
cugggcaucugccucac

SEQ ID NO: 288 - RNA, 17 nt, Homo sapiens
aucugccucaccuccac

SEQ ID NO: 289 - RNA, 17 nt, Homo sapiens
ccucaccuccaccgugc

SEQ ID NO: 290 - RNA, 17 nt, Homo sapiens
gugcaacucaucacgca

SEQ ID NO: 291 - RNA, 17 nt, Homo sapiens
caacucaucacgcagcu

SEQ ID NO: 292 - RNA, 17 nt, Homo sapiens
acgcagcucaugcccuu

SEQ ID NO: 293 - RNA, 17 nt, Homo sapiens
caugcccuucggcugcc

SEQ ID NO: 294 - RNA, 17 nt, Homo sapiens
augcccuucggcugccu

SEQ ID NO: 295 - RNA, 17 nt, Homo sapiens
ggcugccuccuggacua

SEQ ID NO: 296 - RNA, 17 nt, Homo sapiens
ccuggacuauguccggg

SEQ ID NO: 297 - RNA, 17 nt, Homo sapiens
gacuauguccgggaaca

SEQ ID NO: 298 - RNA, 17 nt, Homo sapiens
aagacaauauuggcucc

SEQ ID NO: 299 - RNA, 17 nt, Homo sapiens
gacaauauuggcuccca

SEQ ID NO: 300 - RNA, 17 nt, Homo sapiens
uauuggcucccaguacc

SEQ ID NO: 301 - RNA, 17 nt, Homo sapiens
cucccaguaccugcuca

SEQ ID NO: 302 - RNA, 17 nt, Homo sapiens
uaccugcucaacuggug

SEQ ID NO: 303 - RNA, 17 nt, Homo sapiens
gugcagaucgcaaaggg

SEQ ID NO: 304 - RNA, 17 nt, Homo sapiens
caugaacuacuuggagg

SEQ ID NO: 305 - RNA, 17 nt, Homo sapiens
gaacuacuuggaggacc

SEQ ID NO: 306 - RNA, 17 nt, Homo sapiens
aggaccgucgcuuggug

SEQ ID NO: 307 - RNA, 17 nt, Homo sapiens
ccgucgcuuggugcacc

SEQ ID NO: 308 - RNA, 17 nt, Homo sapiens
aggaacguacuggugaa

SEQ ID NO: 309 - RNA, 17 nt, Homo sapiens
cagcaugucaagaucac

SEQ ID NO: 310 - RNA, 17 nt, Homo sapiens
gucaagaucacagauuu

SEQ ID NO: 311 - RNA, 17 nt, Homo sapiens
ucacagauuuugggcug

SEQ ID NO: 312 - RNA, 17 nt, Homo sapiens
cacagauuuugggcugg

SEQ ID NO: 313 - RNA, 17 nt, Homo sapiens
acagauuuugggcuggc

SEQ ID NO: 314 - RNA, 17 nt, Homo sapiens
gaaagaauaccaugcag

SEQ ID NO: 315 - RNA, 17 nt, Homo sapiens
aagugccuaucaagugg

SEQ ID NO: 316 - RNA, 17 nt, Homo sapiens
gugccuaucaaguggau

SEQ ID NO: 317 - RNA, 17 nt, Homo sapiens
gauggcauuggaaucaa

SEQ ID NO: 318 - RNA, 17 nt, Homo sapiens
auuggaaucaauuuuac

SEQ ID NO: 319 - RNA, 17 nt, Homo sapiens
gaaucaauuuuacacag

SEQ ID NO: 320 - RNA, 17 nt, Homo sapiens
aaucaauuuuacacaga

SEQ ID NO: 321 - RNA, 17 nt, Homo sapiens
aucaauuuuacacagaa

SEQ ID NO: 322 - RNA, 17 nt, Homo sapiens
ucaauuuuacacagaau

SEQ ID NO: 323 - RNA, 17 nt, Homo sapiens
cacagaaucuauaccca

SEQ ID NO: 324 - RNA, 17 nt, Homo sapiens
cagaaucuauacccacc

SEQ ID NO: 325 - RNA, 17 nt, Homo sapiens
gaaucuauacccaccag

SEQ ID NO: 326 - RNA, 17 nt, Homo sapiens
agugaugucuggagcua

SEQ ID NO: 327 - RNA, 17 nt, Homo sapiens
cuggagcuacgggguga

SEQ ID NO: 328 - RNA, 17 nt, Homo sapiens
gugaccguuugggaguu

SEQ ID NO: 329 - RNA, 17 nt, Homo sapiens
ugaccguuugggaguug

SEQ ID NO: 330 - RNA, 17 nt, Homo sapiens
uugggaguugaugaccu

SEQ ID NO: 331 - RNA, 17 nt, Homo sapiens
gaugaccuuuggaucca

SEQ ID NO: 332 - RNA, 17 nt, Homo sapiens
augaccuuuggauccaa

SEQ ID NO: 333 - RNA, 17 nt, Homo sapiens
cuuuggauccaagccau

SEQ ID NO: 334 - RNA, 17 nt, Homo sapiens
caagccauaugacggaa

SEQ ID NO: 335 - RNA, 17 nt, Homo sapiens
gacggaaucccugccag

SEQ ID NO: 336 - RNA, 17 nt, Homo sapiens
agcgagaucuccuccau

SEQ ID NO: 337 - RNA, 17 nt, Homo sapiens
cgagaucuccuccaucc

SEQ ID NO: 338 - RNA, 17 nt, Homo sapiens
gaucuccuccauccugg

SEQ ID NO: 339 - RNA, 17 nt, Homo sapiens
uccuccauccuggagaa

SEQ ID NO: 340 - RNA, 17 nt, Homo sapiens
gaacgccucccucagcc

SEQ ID NO: 341 - RNA, 17 nt, Homo sapiens
gccucccucagccaccc

SEQ ID NO: 342 - RNA, 17 nt, Homo sapiens
ccacccauauguaccau

SEQ ID NO: 343 - RNA, 17 nt, Homo sapiens
ccauauguaccaucgau

SEQ ID NO: 344 - RNA, 17 nt, Homo sapiens
uguaccaucgaugucua

SEQ ID NO: 345 - RNA, 17 nt, Homo sapiens
aucgaugucuacaugau

SEQ ID NO: 346 - RNA, 17 nt, Homo sapiens
cgaugucuacaugauca

SEQ ID NO: 347 - RNA, 17 nt, Homo sapiens
uacaugaucauggucaa

SEQ ID NO: 348 - RNA, 17 nt, Homo sapiens
aucauggucaagugcug

SEQ ID NO: 349 - RNA, 17 nt, Homo sapiens
uggaugauagacgcaga

SEQ ID NO: 350 - RNA, 17 nt, Homo sapiens
acgcagauagucgccca

SEQ ID NO: 351 - RNA, 17 nt, Homo sapiens
cagauagucgcccaaag

SEQ ID NO: 352 - RNA, 17 nt, Homo sapiens
cccaaaguuccgugagu

SEQ ID NO: 353 - RNA, 17 nt, Homo sapiens
ccaaaguuccgugaguu

SEQ ID NO: 354 - RNA, 17 nt, Homo sapiens
ccgugaguugaucaucg

SEQ ID NO: 355 - RNA, 17 nt, Homo sapiens
gaguugaucaucgaauu

SEQ ID NO: 356 - RNA, 17 nt, Homo sapiens
uugaucaucgaauucuc

SEQ ID NO: 357 - RNA, 17 nt, Homo sapiens
caucgaauucuccaaaa

SEQ ID NO: 358 - RNA, 17 nt, Homo sapiens
aucgaauucuccaaaau

SEQ ID NO: 359 - RNA, 17 nt, Homo sapiens
cgaauucuccaaaaugg

SEQ ID NO: 360 - RNA, 17 nt, Homo sapiens
ccagcgcuaccuuguca

SEQ ID NO: 361 - RNA, 17 nt, Homo sapiens
cgcuaccuugucauuca

SEQ ID NO: 362 - RNA, 17 nt, Homo sapiens
uaccuugucauucaggg

SEQ ID NO: 363 - RNA, 17 nt, Homo sapiens
cuugucauucaggggga

SEQ ID NO: 364 - RNA, 17 nt, Homo sapiens
uugucauucagggggau

SEQ ID NO: 365 - RNA, 17 nt, Homo sapiens
gaaugcauuugccaagu

SEQ ID NO: 366 - RNA, 17 nt, Homo sapiens
aaugcauuugccaaguc

SEQ ID NO: 367 - RNA, 17 nt, Homo sapiens
ugccaaguccuacagac

SEQ ID NO: 368 - RNA, 17 nt, Homo sapiens
caaguccuacagacucc

SEQ ID NO: 369 - RNA, 17 nt, Homo sapiens
uacagacuccaacuucu

SEQ ID NO: 370 - RNA, 17 nt, Homo sapiens
cuccaacuucuaccgug

SEQ ID NO: 371 - RNA, 17 nt, Homo sapiens
uccaacuucuaccgugc

SEQ ID NO: 372 - RNA, 17 nt, Homo sapiens
caacuucuaccgugccc

SEQ ID NO: 373 - RNA, 17 nt, Homo sapiens
cgacgaguaccucaucc

SEQ ID NO: 374 - RNA, 17 nt, Homo sapiens
gaguaccucaucccaca

SEQ ID NO: 375 - RNA, 17 nt, Homo sapiens
uaccucaucccacagca

SEQ ID NO: 376 - RNA, 17 nt, Homo sapiens
gcagggcuucuucagca

SEQ ID NO: 377 - RNA, 17 nt, Homo sapiens
cagggcuucuucagcag

SEQ ID NO: 378 - RNA, 17 nt, Homo sapiens
gggcuucuucagcagcc

SEQ ID NO: 379 - RNA, 17 nt, Homo sapiens
ggcuucuucagcagccc

SEQ ID NO: 380 - RNA, 17 nt, Homo sapiens
cagccccuccacgucac

SEQ ID NO: 381 - RNA, 17 nt, Homo sapiens
cuccacgucacggacuc

SEQ ID NO: 382 - RNA, 17 nt, Homo sapiens
cacggacuccccuccug

SEQ ID NO: 383 - RNA, 17 nt, Homo sapiens
acuccccuccugagcuc

SEQ ID NO: 384 - RNA, 17 nt, Homo sapiens
ccugagcucucugagug

SEQ ID NO: 385 - RNA, 17 nt, Homo sapiens
ugagcucucugagugca

SEQ ID NO: 386 - RNA, 17 nt, Homo sapiens
gcaacaauuccaccgug

SEQ ID NO: 387 - RNA, 17 nt, Homo sapiens
caacaauuccaccgugg

SEQ ID NO: 388 - RNA, 17 nt, Homo sapiens
ccguggcuugcauugau

SEQ ID NO: 389 - RNA, 17 nt, Homo sapiens
gcuugcauugauagaaa

SEQ ID NO: 390 - RNA, 17 nt, Homo sapiens
gcauugauagaaauggg

SEQ ID NO: 391 - RNA, 17 nt, Homo sapiens
aaagcugucccaucaag

SEQ ID NO: 392 - RNA, 17 nt, Homo sapiens
ugucccaucaaggaaga

SEQ ID NO: 393 - RNA, 17 nt, Homo sapiens
agacagcuucuugcagc

SEQ ID NO: 394 - RNA, 17 nt, Homo sapiens
gacagcuucuugcagcg

SEQ ID NO: 395 - RNA, 17 nt, Homo sapiens
cagcuucuugcagcgau

SEQ ID NO: 396 - RNA, 17 nt, Homo sapiens
gcagcgauacagcucag

SEQ ID NO: 397 - RNA, 17 nt, Homo sapiens
auacagcucagacccca

SEQ ID NO: 398 - RNA, 17 nt, Homo sapiens
aggcgccuugacugagg

SEQ ID NO: 399 - RNA, 17 nt, Homo sapiens
gacagcauagacgacac

SEQ ID NO: 400 - RNA, 17 nt, Homo sapiens
cgacaccuuccucccag

SEQ ID NO: 401 - RNA, 17 nt, Homo sapiens
gacaccuuccucccagu

SEQ ID NO: 402 - RNA, 17 nt, Homo sapiens
accuuccucccagugcc

SEQ ID NO: 403 - RNA, 17 nt, Homo sapiens
gccugaauacauaaacc

SEQ ID NO: 404 - RNA, 17 nt, Homo sapiens
gaauacauaaaccaguc

SEQ ID NO: 405 - RNA, 17 nt, Homo sapiens
aaaccaguccguuccca

SEQ ID NO: 406 - RNA, 17 nt, Homo sapiens
caguccguucccaaaag

SEQ ID NO: 407 - RNA, 17 nt, Homo sapiens
aguccguucccaaaagg

SEQ ID NO: 408 - RNA, 17 nt, Homo sapiens
cgcuggcucugugcaga

SEQ ID NO: 409 - RNA, 17 nt, Homo sapiens
ugcagaauccugucuau

SEQ ID NO: 410 - RNA, 17 nt, Homo sapiens
aauccugucuaucacaa

SEQ ID NO: 411 - RNA, 17 nt, Homo sapiens
uccugucuaucacaauc

SEQ ID NO: 412 - RNA, 17 nt, Homo sapiens
cugucuaucacaaucag

SEQ ID NO: 413 - RNA, 17 nt, Homo sapiens
aucacaaucagccucug

SEQ ID NO: 414 - RNA, 17 nt, Homo sapiens
aucagccucugaacccc

SEQ ID NO: 415 - RNA, 17 nt, Homo sapiens
cccacacuaccaggacc

SEQ ID NO: 416 - RNA, 17 nt, Homo sapiens
ccccgaguaucucaaca

SEQ ID NO: 417 - RNA, 17 nt, Homo sapiens
ccgaguaucucaacacu

SEQ ID NO: 418 - RNA, 17 nt, Homo sapiens
gaguaucucaacacugu

SEQ ID NO: 419 - RNA, 17 nt, Homo sapiens
aacacuguccagcccac

SEQ ID NO: 420 - RNA, 17 nt, Homo sapiens
accugugucaacagcac

SEQ ID NO: 421 - RNA, 17 nt, Homo sapiens
cagcacauucgacagcc

SEQ ID NO: 422 - RNA, 17 nt, Homo sapiens
agcacauucgacagccc

SEQ ID NO: 423 - RNA, 17 nt, Homo sapiens
caccaaauuagccugga

SEQ ID NO: 424 - RNA, 17 nt, Homo sapiens
accaaauuagccuggac

SEQ ID NO: 425 - RNA, 17 nt, Homo sapiens
cccugacuaccagcagg

SEQ ID NO: 426 - RNA, 17 nt, Homo sapiens
gcaggacuucuuuccca

SEQ ID NO: 427 - RNA, 17 nt, Homo sapiens
caggacuucuuucccaa

SEQ ID NO: 428 - RNA, 17 nt, Homo sapiens
ggacuucuuucccaagg

SEQ ID NO: 429 - RNA, 17 nt, Homo sapiens
gacuucuuucccaagga

SEQ ID NO: 430 - RNA, 17 nt, Homo sapiens
acuucuuucccaaggaa

SEQ ID NO: 431 - RNA, 17 nt, Homo sapiens
aauggcaucuuuaaggg

SEQ ID NO: 432 - RNA, 17 nt, Homo sapiens
uggcaucuuuaagggcu

SEQ ID NO: 433 - RNA, 17 nt, Homo sapiens
ggcaucuuuaagggcuc

SEQ ID NO: 434 - RNA, 17 nt, Homo sapiens
gcaucuuuaagggcucc

SEQ ID NO: 435 - RNA, 17 nt, Homo sapiens
uaagggcuccacagcug

SEQ ID NO: 436 - RNA, 17 nt, Homo sapiens
ugcagaauaccuaaggg

SEQ ID NO: 437 - RNA, 17 nt, Homo sapiens
gaauaccuaagggucgc

SEQ ID NO: 438 - RNA, 17 nt, Homo sapiens
cuaagggucgcgccaca

SEQ ID NO: 439 - RNA, 17 nt, Homo sapiens
cagugaauuuauuggag

SEQ ID NO: 440 - RNA, 17 nt, Homo sapiens
agugaauuuauuggagc

SEQ ID NO: 441 - RNA, 17 nt, Homo sapiens
gugaauuuauuggagca

SEQ ID NO: 442 - RNA, 17 nt, Homo sapiens
gaauuuauuggagcaug

SEQ ID NO: 443 - RNA, 17 nt, Homo sapiens
cggaggauaguaugagc

SEQ ID NO: 444 - RNA, 17 nt, Homo sapiens
aggauaguaugagcccu

SEQ ID NO: 445 - RNA, 17 nt, Homo sapiens
ugagcccuaaaaaucca

SEQ ID NO: 446 - RNA, 17 nt, Homo sapiens
cuaaaaauccagacucu

SEQ ID NO: 447 - RNA, 17 nt, Homo sapiens
uccagacucuuucgaua

SEQ ID NO: 448 - RNA, 17 nt, Homo sapiens
cagacucuuucgauacc

SEQ ID NO: 449 - RNA, 17 nt, Homo sapiens
agacucuuucgauaccc

SEQ ID NO: 450 - RNA, 17 nt, Homo sapiens
gacucuuucgauaccca

SEQ ID NO: 451 - RNA, 17 nt, Homo sapiens
cuuucgauacccaggac

SEQ ID NO: 452 - RNA, 17 nt, Homo sapiens
cagcagguccuccaucc

SEQ ID NO: 453 - RNA, 17 nt, Homo sapiens
cagguccuccaucccaa

SEQ ID NO: 454 - RNA, 17 nt, Homo sapiens
uccuccaucccaacagc

SEQ ID NO: 455 - RNA, 17 nt, Homo sapiens
gcccgcauuagcucuua

SEQ ID NO: 456 - RNA, 17 nt, Homo sapiens
cccgcauuagcucuuag

SEQ ID NO: 457 - RNA, 17 nt, Homo sapiens
cauuagcucuuagaccc

SEQ ID NO: 458 - RNA, 17 nt, Homo sapiens
uuagcucuuagacccac

SEQ ID NO: 459 - RNA, 17 nt, Homo sapiens
uagcucuuagacccaca

SEQ ID NO: 460 - RNA, 17 nt, Homo sapiens
agacugguuuugcaacg

SEQ ID NO: 461 - RNA, 17 nt, Homo sapiens
gacugguuuugcaacgu

SEQ ID NO: 462 - RNA, 17 nt, Homo sapiens
acugguuuugcaacguu

SEQ ID NO: 463 - RNA, 17 nt, Homo sapiens
ugcaacguuuacaccga

SEQ ID NO: 464 - RNA, 17 nt, Homo sapiens
gcaacguuuacaccgac

SEQ ID NO: 465 - RNA, 17 nt, Homo sapiens
caacguuuacaccgacu

SEQ ID NO: 466 - RNA, 17 nt, Homo sapiens
caccgacuagccaggaa

SEQ ID NO: 467 - RNA, 17 nt, Homo sapiens
caggaaguacuuccacc

SEQ ID NO: 468 - RNA, 17 nt, Homo sapiens
gaaguacuuccaccucg

SEQ ID NO: 469 - RNA, 17 nt, Homo sapiens
aaguacuuccaccucgg

SEQ ID NO: 470 - RNA, 17 nt, Homo sapiens
uuccaccucgggcacau

SEQ ID NO: 471 - RNA, 17 nt, Homo sapiens
gggcacauuuugggaag

SEQ ID NO: 472 - RNA, 17 nt, Homo sapiens
ggcacauuuugggaagu

SEQ ID NO: 473 - RNA, 17 nt, Homo sapiens
gcacauuuugggaaguu

SEQ ID NO: 474 - RNA, 17 nt, Homo sapiens
ugggaaguugcauuccu

SEQ ID NO: 475 - RNA, 17 nt, Homo sapiens
aguugcauuccuuuguc

SEQ ID NO: 476 - RNA, 17 nt, Homo sapiens
guugcauuccuuugucu

SEQ ID NO: 477 - RNA, 17 nt, Homo sapiens
gcauuccuuugucuuca

SEQ ID NO: 478 - RNA, 17 nt, Homo sapiens
cauuccuuugucuucaa

SEQ ID NO: 479 - RNA, 17 nt, Homo sapiens
uccuuugucuucaaacu

SEQ ID NO: 480 - RNA, 17 nt, Homo sapiens
cuuugucuucaaacugu

SEQ ID NO: 481 - RNA, 17 nt, Homo sapiens
uuugucuucaaacugug

SEQ ID NO: 482 - RNA, 17 nt, Homo sapiens
ugaagcauuuacagaaa

SEQ ID NO: 483 - RNA, 17 nt, Homo sapiens
gaagcauuuacagaaac

SEQ ID NO: 484 - RNA, 17 nt, Homo sapiens
aagcauuuacagaaacg

SEQ ID NO: 485 - RNA, 17 nt, Homo sapiens
aaacgcauccagcaaga

SEQ ID NO: 486 - RNA, 17 nt, Homo sapiens
gcaagaauauugucccu

SEQ ID NO: 487 - RNA, 17 nt, Homo sapiens
aagaauauugucccuuu

SEQ ID NO: 488 - RNA, 17 nt, Homo sapiens
aauauugucccuuugag

SEQ ID NO: 489 - RNA, 17 nt, Homo sapiens
uugucccuuugagcaga

SEQ ID NO: 490 - RNA, 17 nt, Homo sapiens
ugucccuuugagcagaa

SEQ ID NO: 491 - RNA, 17 nt, Homo sapiens
gcagaaauuuaucuuuc

SEQ ID NO: 492 - RNA, 17 nt, Homo sapiens
cagaaauuuaucuuuca

SEQ ID NO: 493 - RNA, 17 nt, Homo sapiens
agaaauuuaucuuucaa

SEQ ID NO: 494 - RNA, 17 nt, Homo sapiens
aaauuuaucuuucaaag

SEQ ID NO: 495 - RNA, 17 nt, Homo sapiens
auuuaucuuucaaagag

SEQ ID NO: 496 - RNA, 17 nt, Homo sapiens
uuuaucuuucaaagagg

SEQ ID NO: 497 - RNA, 17 nt, Homo sapiens
uuaucuuucaaagaggu

SEQ ID NO: 498 - RNA, 17 nt, Homo sapiens
aaagagguauauuugaa

SEQ ID NO: 499 - RNA, 17 nt, Homo sapiens
agagguauauuugaaaa

SEQ ID NO: 500 - RNA, 17 nt, Homo sapiens
agguauauuugaaaaaa

SEQ ID NO: 501 - RNA, 17 nt, Homo sapiens
gguauauuugaaaaaaa

SEQ ID NO: 502 - RNA, 17 nt, Homo sapiens
aaaaaaguauaugugag

SEQ ID NO: 503 - RNA, 17 nt, Homo sapiens
aaaaguauaugugagga

SEQ ID NO: 504 - RNA, 17 nt, Homo sapiens
gugaggauuuuuauuga

SEQ ID NO: 505 - RNA, 17 nt, Homo sapiens
ugaggauuuuuauugau

SEQ ID NO: 506 - RNA, 17 nt, Homo sapiens
gaggauuuuuauugauu

SEQ ID NO: 507 - RNA, 17 nt, Homo sapiens
aggauuuuuauugauug

SEQ ID NO: 508 - RNA, 17 nt, Homo sapiens
ggauuuuuauugauugg

SEQ ID NO: 509 - RNA, 17 nt, Homo sapiens
auuuuuauugauugggg

SEQ ID NO: 510 - RNA, 17 nt, Homo sapiens
uuauugauuggggaucu

SEQ ID NO: 511 - RNA, 17 nt, Homo sapiens
uuggggaucuuggaguu

SEQ ID NO: 512 - RNA, 17 nt, Homo sapiens
ggggaucuuggaguuuu

SEQ ID NO: 513 - RNA, 17 nt, Homo sapiens
cuuggaguuuuucauug

SEQ ID NO: 514 - RNA, 17 nt, Homo sapiens
uuggaguuuuucauugu

SEQ ID NO: 515 - RNA, 17 nt, Homo sapiens
uggaguuuuucauuguc

SEQ ID NO: 516 - RNA, 17 nt, Homo sapiens
ggaguuuuucauugucg

SEQ ID NO: 517 - RNA, 17 nt, Homo sapiens
gaguuuuucauugucgc

SEQ ID NO: 518 - RNA, 17 nt, Homo sapiens
uuuuucauugucgcuau

SEQ ID NO: 519 - RNA, 17 nt, Homo sapiens
uucauugucgcuauuga

SEQ ID NO: 520 - RNA, 17 nt, Homo sapiens
uugucgcuauugauuuu

SEQ ID NO: 521 - RNA, 17 nt, Homo sapiens
gucgcuauugauuuuua

SEQ ID NO: 522 - RNA, 17 nt, Homo sapiens
cuauugauuuuuacuuc

SEQ ID NO: 523 - RNA, 17 nt, Homo sapiens
uauugauuuuuacuuca

SEQ ID NO: 524 - RNA, 17 nt, Homo sapiens
auugauuuuuacuucaa

SEQ ID NO: 525 - RNA, 17 nt, Homo sapiens
uugauuuuuacuucaau

SEQ ID NO: 526 - RNA, 17 nt, Homo sapiens
ugauuuuuacuucaaug

SEQ ID NO: 527 - RNA, 17 nt, Homo sapiens
uuuuuacuucaaugggc

SEQ ID NO: 528 - RNA, 17 nt, Homo sapiens
uuuuacuucaaugggcu

SEQ ID NO: 529 - RNA, 17 nt, Homo sapiens
aaugggcucuuccaaca

SEQ ID NO: 530 - RNA, 17 nt, Homo sapiens
ugggcucuuccaacaag

SEQ ID NO: 531 - RNA, 17 nt, Homo sapiens
gggcucuuccaacaagg

SEQ ID NO: 532 - RNA, 17 nt, Homo sapiens
aagaagcuugcugguag

SEQ ID NO: 533 - RNA, 17 nt, Homo sapiens
uugcugguagcacuugc

SEQ ID NO: 534 - RNA, 17 nt, Homo sapiens
guagcacuugcuacccu

SEQ ID NO: 535 - RNA, 17 nt, Homo sapiens
cacuugcuacccugagu

SEQ ID NO: 536 - RNA, 17 nt, Homo sapiens
cccugaguucauccagg

SEQ ID NO: 537 - RNA, 17 nt, Homo sapiens
ccugaguucauccaggc

SEQ ID NO: 538 - RNA, 17 nt, Homo sapiens
gaguucauccaggccca

SEQ ID NO: 539 - RNA, 17 nt, Homo sapiens
ccacaagucuuccagag

SEQ ID NO: 540 - RNA, 17 nt, Homo sapiens
acaagucuuccagagga

SEQ ID NO: 541 - RNA, 17 nt, Homo sapiens
caagucuuccagaggau

SEQ ID NO: 542 - RNA, 17 nt, Homo sapiens
aggaugcuugauuccag

SEQ ID NO: 543 - RNA, 17 nt, Homo sapiens
ugcuugauuccaguggu

SEQ ID NO: 544 - RNA, 17 nt, Homo sapiens
gcuugauuccagugguu

SEQ ID NO: 545 - RNA, 17 nt, Homo sapiens
ccagugguucugcuuca

SEQ ID NO: 546 - RNA, 17 nt, Homo sapiens
cagugguucugcuucaa

SEQ ID NO: 547 - RNA, 17 nt, Homo sapiens
guucugcuucaaggcuu

SEQ ID NO: 548 - RNA, 17 nt, Homo sapiens
uucugcuucaaggcuuc

SEQ ID NO: 549 - RNA, 17 nt, Homo sapiens
ucaaggcuuccacugca

SEQ ID NO: 550 - RNA, 17 nt, Homo sapiens
caaggcuuccacugcaa

SEQ ID NO: 551 - RNA, 17 nt, Homo sapiens
aaaacacuaaagaucca

SEQ ID NO: 552 - RNA, 17 nt, Homo sapiens
cuaaagauccaagaagg

SEQ ID NO: 553 - RNA, 17 nt, Homo sapiens
gaaggccuucauggccc

SEQ ID NO: 554 - RNA, 17 nt, Homo sapiens
aaggccuucauggcccc

SEQ ID NO: 555 - RNA, 17 nt, Homo sapiens
ggccggaucgguacugu

SEQ ID NO: 556 - RNA, 17 nt, Homo sapiens
ggaucgguacuguauca

SEQ ID NO: 557 - RNA, 17 nt, Homo sapiens
gguacuguaucaaguca

SEQ ID NO: 558 - RNA, 17 nt, Homo sapiens
uacuguaucaagucaug

SEQ ID NO: 559 - RNA, 17 nt, Homo sapiens
uaucaagucauggcagg

SEQ ID NO: 560 - RNA, 17 nt, Homo sapiens
uggcagguacaguagga

SEQ ID NO: 561 - RNA, 17 nt, Homo sapiens
gguacaguaggauaagc

SEQ ID NO: 562 - RNA, 17 nt, Homo sapiens
aguaggauaagccacuc

SEQ ID NO: 563 - RNA, 17 nt, Homo sapiens
aagccacucugucccuu

SEQ ID NO: 564 - RNA, 17 nt, Homo sapiens
cacucugucccuuccug

SEQ ID NO: 565 - RNA, 17 nt, Homo sapiens
cugucccuuccugggca

SEQ ID NO: 566 - RNA, 17 nt, Homo sapiens
ugucccuuccugggcaa

SEQ ID NO: 567 - RNA, 17 nt, Homo sapiens
ggaugaauucuuccuua

SEQ ID NO: 568 - RNA, 17 nt, Homo sapiens
gaugaauucuuccuuag

SEQ ID NO: 569 - RNA, 17 nt, Homo sapiens
ugaauucuuccuuagac

SEQ ID NO: 570 - RNA, 17 nt, Homo sapiens
gaauucuuccuuagacu

SEQ ID NO: 571 - RNA, 17 nt, Homo sapiens
uucuuccuuagacuuac

SEQ ID NO: 572 - RNA, 17 nt, Homo sapiens
ucuuccuuagacuuacu

SEQ ID NO: 573 - RNA, 17 nt, Homo sapiens
cuuagacuuacuuuugu

SEQ ID NO: 574 - RNA, 17 nt, Homo sapiens
uuagacuuacuuuugua

SEQ ID NO: 575 - RNA, 17 nt, Homo sapiens
gacuuacuuuuguaaaa

SEQ ID NO: 576 - RNA, 17 nt, Homo sapiens
acuuacuuuuguaaaaa

SEQ ID NO: 577 - RNA, 17 nt, Homo sapiens
cuuacuuuuguaaaaau

SEQ ID NO: 578 - RNA, 17 nt, Homo sapiens
acuuuuguaaaaauguc

SEQ ID NO: 579 - RNA, 17 nt, Homo sapiens
aaaaauguccccacggu

SEQ ID NO: 580 - RNA, 17 nt, Homo sapiens
cccacgguacuuacucc

SEQ ID NO: 581 - RNA, 17 nt, Homo sapiens
acgguacuuacucccca

SEQ ID NO: 582 - RNA, 17 nt, Homo sapiens
cgguacuuacuccccac

SEQ ID NO: 583 - RNA, 17 nt, Homo sapiens
uacuuacuccccacuga

SEQ ID NO: 584 - RNA, 17 nt, Homo sapiens
ccagugguuuccaguca

SEQ ID NO: 585 - RNA, 17 nt, Homo sapiens
cagugguuuccagucau

SEQ ID NO: 586 - RNA, 17 nt, Homo sapiens
agugguuuccagucaug

SEQ ID NO: 587 - RNA, 17 nt, Homo sapiens
uuuccagucaugagcgu

SEQ ID NO: 588 - RNA, 17 nt, Homo sapiens
augagcguuagacugac

SEQ ID NO: 589 - RNA, 17 nt, Homo sapiens
ugagcguuagacugacu

SEQ ID NO: 590 - RNA, 17 nt, Homo sapiens
gacugacuuguuugucu

SEQ ID NO: 591 - RNA, 17 nt, Homo sapiens
ugacuuguuugucuucc

SEQ ID NO: 592 - RNA, 17 nt, Homo sapiens
gacuuguuugucuucca

SEQ ID NO: 593 - RNA, 17 nt, Homo sapiens
uuguuugucuuccauuc

SEQ ID NO: 594 - RNA, 17 nt, Homo sapiens
guuugucuuccauucca

SEQ ID NO: 595 - RNA, 17 nt, Homo sapiens
uuugucuuccauuccau

SEQ ID NO: 596 - RNA, 17 nt, Homo sapiens
ucuuccauuccauuguu

SEQ ID NO: 597 - RNA, 17 nt, Homo sapiens
cuuccauuccauuguuu

SEQ ID NO: 598 - RNA, 17 nt, Homo sapiens
cauuccauuguuuugaa

SEQ ID NO: 599 - RNA, 17 nt, Homo sapiens
uccauuguuuugaaacu

SEQ ID NO: 600 - RNA, 17 nt, Homo sapiens
ccauuguuuugaaacuc

SEQ ID NO: 601 - RNA, 17 nt, Homo sapiens
cauuguuuugaaacuca

SEQ ID NO: 602 - RNA, 17 nt, Homo sapiens
uugaaacucaguaugcc

SEQ ID NO: 603 - RNA, 17 nt, Homo sapiens
aacucaguaugccgccc

SEQ ID NO: 604 - RNA, 17 nt, Homo sapiens
gccccugucuugcuguc

SEQ ID NO: 605 - RNA, 17 nt, Homo sapiens
cccugucuugcugucau

SEQ ID NO: 606 - RNA, 17 nt, Homo sapiens
cuugcugucaugaaauc

SEQ ID NO: 607 - RNA, 17 nt, Homo sapiens
caugaaaucagcaagag

SEQ ID NO: 608 - RNA, 17 nt, Homo sapiens
ugacacaucaaauaaua

SEQ ID NO: 609 - RNA, 17 nt, Homo sapiens
caucaaauaauaacucg

SEQ ID NO: 610 - RNA, 17 nt, Homo sapiens
caaauaauaacucggau

SEQ ID NO: 611 - RNA, 17 nt, Homo sapiens
uaauaacucggauucca

SEQ ID NO: 612 - RNA, 17 nt, Homo sapiens
acucggauuccagccca

SEQ ID NO: 613 - RNA, 17 nt, Homo sapiens
cucggauuccagcccac

SEQ ID NO: 614 - RNA, 17 nt, Homo sapiens
gcccacauuggauucau

SEQ ID NO: 615 - RNA, 17 nt, Homo sapiens
cauuggauucaucagca

SEQ ID NO: 616 - RNA, 17 nt, Homo sapiens
auuggauucaucagcau

SEQ ID NO: 617 - RNA, 17 nt, Homo sapiens
ggauucaucagcauuug

SEQ ID NO: 618 - RNA, 17 nt, Homo sapiens
aucagcauuuggaccaa

SEQ ID NO: 619 - RNA, 17 nt, Homo sapiens
ucagcauuuggaccaau

SEQ ID NO: 620 - RNA, 17 nt, Homo sapiens
ggaccaauagcccacag

SEQ ID NO: 621 - RNA, 17 nt, Homo sapiens
uguggaauaccuaagga

SEQ ID NO: 622 - RNA, 17 nt, Homo sapiens
gaauaccuaaggauaac

SEQ ID NO: 623 - RNA, 17 nt, Homo sapiens
cuaaggauaacaccgcu

SEQ ID NO: 624 - RNA, 17 nt, Homo sapiens
acaccgcuuuuguucuc

SEQ ID NO: 625 - RNA, 17 nt, Homo sapiens
caccgcuuuuguucucg

SEQ ID NO: 626 - RNA, 17 nt, Homo sapiens
accgcuuuuguucucgc

SEQ ID NO: 627 - RNA, 17 nt, Homo sapiens
gcuuuuguucucgcaaa

SEQ ID NO: 628 - RNA, 17 nt, Homo sapiens
cuuuuguucucgcaaaa

SEQ ID NO: 629 - RNA, 17 nt, Homo sapiens
uuuguucucgcaaaaac

SEQ ID NO: 630 - RNA, 17 nt, Homo sapiens
aaaaacguaucuccuaa

SEQ ID NO: 631 - RNA, 17 nt, Homo sapiens
aaacguaucuccuaauu

SEQ ID NO: 632 - RNA, 17 nt, Homo sapiens
acguaucuccuaauuug

SEQ ID NO: 633 - RNA, 17 nt, Homo sapiens
uaucuccuaauuugagg

SEQ ID NO: 634 - RNA, 17 nt, Homo sapiens
cuccuaauuugaggcuc

SEQ ID NO: 635 - RNA, 17 nt, Homo sapiens
uccuaauuugaggcuca

SEQ ID NO: 636 - RNA, 17 nt, Homo sapiens
uugaggcucagaugaaa

SEQ ID NO: 637 - RNA, 17 nt, Homo sapiens
aaaugcaucagguccuu

SEQ ID NO: 638 - RNA, 17 nt, Homo sapiens
caucagguccuuugggg

SEQ ID NO: 639 - RNA, 17 nt, Homo sapiens
cagguccuuuggggcau

SEQ ID NO: 640 - RNA, 17 nt, Homo sapiens
agguccuuuggggcaua

SEQ ID NO: 641 - RNA, 17 nt, Homo sapiens
uggggcauagaucagaa

SEQ ID NO: 642 - RNA, 17 nt, Homo sapiens
gcauagaucagaagacu

SEQ ID NO: 643 - RNA, 17 nt, Homo sapiens
agaagacuacaaaaaug

SEQ ID NO: 644 - RNA, 17 nt, Homo sapiens
aagcugcucugaaaucu

SEQ ID NO: 645 - RNA, 17 nt, Homo sapiens
ucugaaaucuccuuuag

SEQ ID NO: 646 - RNA, 17 nt, Homo sapiens
ugaaaucuccuuuagcc

SEQ ID NO: 647 - RNA, 17 nt, Homo sapiens
aaucuccuuuagccauc

SEQ ID NO: 648 - RNA, 17 nt, Homo sapiens
aucuccuuuagccauca

SEQ ID NO: 649 - RNA, 17 nt, Homo sapiens
ucuccuuuagccaucac

SEQ ID NO: 650 - RNA, 17 nt, Homo sapiens
uuagccaucaccccaac

SEQ ID NO: 651 - RNA, 17 nt, Homo sapiens
cccaaaauuaguuugug

SEQ ID NO: 652 - RNA, 17 nt, Homo sapiens
ccaaaauuaguuugugu

SEQ ID NO: 653 - RNA, 17 nt, Homo sapiens
aaauuaguuuguguuac

SEQ ID NO: 654 - RNA, 17 nt, Homo sapiens
aauuaguuuguguuacu

SEQ ID NO: 655 - RNA, 17 nt, Homo sapiens
guuuguguuacuuaugg

SEQ ID NO: 656 - RNA, 17 nt, Homo sapiens
uuuguguuacuuaugga

SEQ ID NO: 657 - RNA, 17 nt, Homo sapiens
guguuacuuauggaaga

SEQ ID NO: 658 - RNA, 17 nt, Homo sapiens
uguuacuuauggaagau

SEQ ID NO: 659 - RNA, 17 nt, Homo sapiens
uggaagauaguuuucuc

SEQ ID NO: 660 - RNA, 17 nt, Homo sapiens
aagauaguuuucuccuu

SEQ ID NO: 661 - RNA, 17 nt, Homo sapiens
agauaguuuucuccuuu

SEQ ID NO: 662 - RNA, 17 nt, Homo sapiens
gauaguuuucuccuuuu

SEQ ID NO: 663 - RNA, 17 nt, Homo sapiens
auaguuuucuccuuuua

SEQ ID NO: 664 - RNA, 17 nt, Homo sapiens
aguuuucuccuuuuacu

SEQ ID NO: 665 - RNA, 17 nt, Homo sapiens
uuucuccuuuuacuuca

SEQ ID NO: 666 - RNA, 17 nt, Homo sapiens
uucuccuuuuacuucac

SEQ ID NO: 667 - RNA, 17 nt, Homo sapiens
ucuccuuuuacuucacu

SEQ ID NO: 668 - RNA, 17 nt, Homo sapiens
cuccuuuuacuucacuu

SEQ ID NO: 669 - RNA, 17 nt, Homo sapiens
cuuuuacuucacuucaa

SEQ ID NO: 670 - RNA, 17 nt, Homo sapiens
uuuuacuucacuucaaa

SEQ ID NO: 671 - RNA, 17 nt, Homo sapiens
acuucacuucaaaagcu

SEQ ID NO: 672 - RNA, 17 nt, Homo sapiens
cuucacuucaaaagcuu

SEQ ID NO: 673 - RNA, 17 nt, Homo sapiens
caaaagcuuuuuacuca

SEQ ID NO: 674 - RNA, 17 nt, Homo sapiens
aaaagcuuuuuacucaa

SEQ ID NO: 675 - RNA, 17 nt, Homo sapiens
aaagcuuuuuacucaaa

SEQ ID NO: 676 - RNA, 17 nt, Homo sapiens
aagcuuuuuacucaaag

SEQ ID NO: 677 - RNA, 17 nt, Homo sapiens
agcuuuuuacucaaaga

SEQ ID NO: 678 - RNA, 17 nt, Homo sapiens
uuuuuacucaaagagua

SEQ ID NO: 679 - RNA, 17 nt, Homo sapiens
caaagaguauauguucc

SEQ ID NO: 680 - RNA, 17 nt, Homo sapiens
aagaguauauguucccu

SEQ ID NO: 681 - RNA, 17 nt, Homo sapiens
guauauguucccuccag

SEQ ID NO: 682 - RNA, 17 nt, Homo sapiens
uauauguucccuccagg

SEQ ID NO: 683 - RNA, 17 nt, Homo sapiens
uguucccuccaggucag

SEQ ID NO: 684 - RNA, 17 nt, Homo sapiens
cuccaggucagcugccc

SEQ ID NO: 685 - RNA, 17 nt, Homo sapiens
aacccccuccuuacgcu

SEQ ID NO: 686 - RNA, 17 nt, Homo sapiens
ccccuccuuacgcuuug

SEQ ID NO: 687 - RNA, 17 nt, Homo sapiens
cccuccuuacgcuuugu

SEQ ID NO: 688 - RNA, 17 nt, Homo sapiens
cuuacgcuuugucacac

SEQ ID NO: 689 - RNA, 17 nt, Homo sapiens
uuacgcuuugucacaca

SEQ ID NO: 690 - RNA, 17 nt, Homo sapiens
cgcuuugucacacaaaa

SEQ ID NO: 691 - RNA, 17 nt, Homo sapiens
aaaagugucucugccuu

SEQ ID NO: 692 - RNA, 17 nt, Homo sapiens
aagugucucugccuuga

SEQ ID NO: 693 - RNA, 17 nt, Homo sapiens
cucugccuugagucauc

SEQ ID NO: 694 - RNA, 17 nt, Homo sapiens
ccuugagucaucuauuc

SEQ ID NO: 695 - RNA, 17 nt, Homo sapiens
ugagucaucuauucaag

SEQ ID NO: 696 - RNA, 17 nt, Homo sapiens
agucaucuauucaagca

SEQ ID NO: 697 - RNA, 17 nt, Homo sapiens
ucaucuauucaagcacu

SEQ ID NO: 698 - RNA, 17 nt, Homo sapiens
caucuauucaagcacuu

SEQ ID NO: 699 - RNA, 17 nt, Homo sapiens
caagcacuuacagcucu

SEQ ID NO: 700 - RNA, 17 nt, Homo sapiens
aagcacuuacagcucug

SEQ ID NO: 701 - RNA, 17 nt, Homo sapiens
uuacagcucuggccaca

SEQ ID NO: 702 - RNA, 17 nt, Homo sapiens
cagggcauuuuacaggu

SEQ ID NO: 703 - RNA, 17 nt, Homo sapiens
agggcauuuuacaggug

SEQ ID NO: 704 - RNA, 17 nt, Homo sapiens
gggcauuuuacaggugc

SEQ ID NO: 705 - RNA, 17 nt, Homo sapiens
ggcauuuuacaggugcg

SEQ ID NO: 706 - RNA, 17 nt, Homo sapiens
augacaguagcauuaug

SEQ ID NO: 707 - RNA, 17 nt, Homo sapiens
aguagcauuaugaguag

SEQ ID NO: 708 - RNA, 17 nt, Homo sapiens
guagcauuaugaguagu

SEQ ID NO: 709 - RNA, 17 nt, Homo sapiens
uuaugaguagugugaau

SEQ ID NO: 710 - RNA, 17 nt, Homo sapiens
gugugaauucagguagu

SEQ ID NO: 711 - RNA, 17 nt, Homo sapiens
ugugaauucagguagua

SEQ ID NO: 712 - RNA, 17 nt, Homo sapiens
auucagguaguaaauau

SEQ ID NO: 713 - RNA, 17 nt, Homo sapiens
cagguaguaaauaugaa

SEQ ID NO: 714 - RNA, 17 nt, Homo sapiens
uaguaaauaugaaacua

SEQ ID NO: 715 - RNA, 17 nt, Homo sapiens
augaaacuaggguuuga

SEQ ID NO: 716 - RNA, 17 nt, Homo sapiens
acuaggguuugaaauug

SEQ ID NO: 717 - RNA, 17 nt, Homo sapiens
cuaggguuugaaauuga

SEQ ID NO: 718 - RNA, 17 nt, Homo sapiens
uuugaaauugauaaugc

SEQ ID NO: 719 - RNA, 17 nt, Homo sapiens
aaauugauaaugcuuuc

SEQ ID NO: 720 - RNA, 17 nt, Homo sapiens
auaaugcuuucacaaca

SEQ ID NO: 721 - RNA, 17 nt, Homo sapiens
uaaugcuuucacaacau

SEQ ID NO: 722 - RNA, 17 nt, Homo sapiens
aaugcuuucacaacauu

SEQ ID NO: 723 - RNA, 17 nt, Homo sapiens
cacaacauuugcagaug

SEQ ID NO: 724 - RNA, 17 nt, Homo sapiens
acaacauuugcagaugu

SEQ ID NO: 725 - RNA, 17 nt, Homo sapiens
gcagauguuuuagaagg

SEQ ID NO: 726 - RNA, 17 nt, Homo sapiens
cagauguuuuagaagga

SEQ ID NO: 727 - RNA, 17 nt, Homo sapiens
agauguuuuagaaggaa

SEQ ID NO: 728 - RNA, 17 nt, Homo sapiens
gauguuuuagaaggaaa

SEQ ID NO: 729 - RNA, 17 nt, Homo sapiens
aaaaaaguuccuuccua

SEQ ID NO: 730 - RNA, 17 nt, Homo sapiens
aaaaaguuccuuccuaa

SEQ ID NO: 731 - RNA, 17 nt, Homo sapiens
aaguuccuuccuaaaau

SEQ ID NO: 732 - RNA, 17 nt, Homo sapiens
aguuccuuccuaaaaua

SEQ ID NO: 733 - RNA, 17 nt, Homo sapiens
uccuuccuaaaauaauu

SEQ ID NO: 734 - RNA, 17 nt, Homo sapiens
ccuaaaauaauuucucu

SEQ ID NO: 735 - RNA, 17 nt, Homo sapiens
aaaauaauuucucuaca

SEQ ID NO: 736 - RNA, 17 nt, Homo sapiens
aaauaauuucucuacaa

SEQ ID NO: 737 - RNA, 17 nt, Homo sapiens
aauaauuucucuacaau

SEQ ID NO: 738 - RNA, 17 nt, Homo sapiens
uaauuucucuacaauug

SEQ ID NO: 739 - RNA, 17 nt, Homo sapiens
auuucucuacaauugga

SEQ ID NO: 740 - RNA, 17 nt, Homo sapiens
ucuacaauuggaagauu

SEQ ID NO: 741 - RNA, 17 nt, Homo sapiens
uggaagauuggaagauu

SEQ ID NO: 742 - RNA, 17 nt, Homo sapiens
uggaagauucagcuagu

SEQ ID NO: 743 - RNA, 17 nt, Homo sapiens
ggaagauucagcuaguu

SEQ ID NO: 744 - RNA, 17 nt, Homo sapiens
auucagcuaguuaggag

SEQ ID NO: 745 - RNA, 17 nt, Homo sapiens
cagcuaguuaggagccc

SEQ ID NO: 746 - RNA, 17 nt, Homo sapiens
agcuaguuaggagccca

SEQ ID NO: 747 - RNA, 17 nt, Homo sapiens
gagcccauuuuuuccua

SEQ ID NO: 748 - RNA, 17 nt, Homo sapiens
agcccauuuuuuccuaa

SEQ ID NO: 749 - RNA, 17 nt, Homo sapiens
gcccauuuuuuccuaau

SEQ ID NO: 750 - RNA, 17 nt, Homo sapiens
cccauuuuuuccuaauc

SEQ ID NO: 751 - RNA, 17 nt, Homo sapiens
ccauuuuuuccuaaucu

SEQ ID NO: 752 - RNA, 17 nt, Homo sapiens
cauuuuuuccuaaucug

SEQ ID NO: 753 - RNA, 17 nt, Homo sapiens
uuuuuccuaaucugugu

SEQ ID NO: 754 - RNA, 17 nt, Homo sapiens
uuccuaaucugugugug

SEQ ID NO: 755 - RNA, 17 nt, Homo sapiens
ugcccuguaaccugacu

SEQ ID NO: 756 - RNA, 17 nt, Homo sapiens
ugacugguuaacagcag

SEQ ID NO: 757 - RNA, 17 nt, Homo sapiens
gacugguuaacagcagu

SEQ ID NO: 758 - RNA, 17 nt, Homo sapiens
acagcaguccuuuguaa

SEQ ID NO: 759 - RNA, 17 nt, Homo sapiens
gcaguccuuuguaaaca

SEQ ID NO: 760 - RNA, 17 nt, Homo sapiens
caguccuuuguaaacag

SEQ ID NO: 761 - RNA, 17 nt, Homo sapiens
uccuuuguaaacagugu

SEQ ID NO: 762 - RNA, 17 nt, Homo sapiens
aacaguguuuuaaacuc

SEQ ID NO: 763 - RNA, 17 nt, Homo sapiens
acaguguuuuaaacucu

SEQ ID NO: 764 - RNA, 17 nt, Homo sapiens
caguguuuuaaacucuc

SEQ ID NO: 765 - RNA, 17 nt, Homo sapiens
aguguuuuaaacucucc

SEQ ID NO: 766 - RNA, 17 nt, Homo sapiens
uuuaaacucuccuaguc

SEQ ID NO: 767 - RNA, 17 nt, Homo sapiens
uaaacucuccuagucaa

SEQ ID NO: 768 - RNA, 17 nt, Homo sapiens
acucuccuagucaauau

SEQ ID NO: 769 - RNA, 17 nt, Homo sapiens
cuccuagucaauaucca

SEQ ID NO: 770 - RNA, 17 nt, Homo sapiens
uagucaauauccacccc

SEQ ID NO: 771 - RNA, 17 nt, Homo sapiens
gucaauauccaccccau

SEQ ID NO: 772 - RNA, 17 nt, Homo sapiens
caccccauccaauuuau

SEQ ID NO: 773 - RNA, 17 nt, Homo sapiens
cauccaauuuaucaagg

SEQ ID NO: 774 - RNA, 17 nt, Homo sapiens
auccaauuuaucaagga

SEQ ID NO: 775 - RNA, 17 nt, Homo sapiens
uccaauuuaucaaggaa

SEQ ID NO: 776 - RNA, 17 nt, Homo sapiens
caauuuaucaaggaaga

SEQ ID NO: 777 - RNA, 17 nt, Homo sapiens
gaaaugguucagaaaau

SEQ ID NO: 778 - RNA, 17 nt, Homo sapiens
aaaugguucagaaaaua

SEQ ID NO: 779 - RNA, 17 nt, Homo sapiens
cagaaaauauuuucagc

SEQ ID NO: 780 - RNA, 17 nt, Homo sapiens
gaaaauauuuucagccu

SEQ ID NO: 781 - RNA, 17 nt, Homo sapiens
aaaauauuuucagccua

SEQ ID NO: 782 - RNA, 17 nt, Homo sapiens
aaauauuuucagccuac

SEQ ID NO: 783 - RNA, 17 nt, Homo sapiens
aauauuuucagccuaca

SEQ ID NO: 784 - RNA, 17 nt, Homo sapiens
uucagccuacaguuaug

SEQ ID NO: 785 - RNA, 17 nt, Homo sapiens
ccuacaguuauguucag

SEQ ID NO: 786 - RNA, 17 nt, Homo sapiens
cuacaguuauguucagu

SEQ ID NO: 787 - RNA, 17 nt, Homo sapiens
aguuauguucagucaca

SEQ ID NO: 788 - RNA, 17 nt, Homo sapiens
guuauguucagucacac

SEQ ID NO: 789 - RNA, 17 nt, Homo sapiens
uguucagucacacacac

SEQ ID NO: 790 - RNA, 17 nt, Homo sapiens
acacacauacaaaaugu

SEQ ID NO: 791 - RNA, 17 nt, Homo sapiens
caaaauguuccuuuugc

SEQ ID NO: 792 - RNA, 17 nt, Homo sapiens
aaaauguuccuuuugcu

SEQ ID NO: 793 - RNA, 17 nt, Homo sapiens
auguuccuuuugcuuuu

SEQ ID NO: 794 - RNA, 17 nt, Homo sapiens
uguuccuuuugcuuuua

SEQ ID NO: 795 - RNA, 17 nt, Homo sapiens
guuccuuuugcuuuuaa

SEQ ID NO: 796 - RNA, 17 nt, Homo sapiens
cuuuugcuuuuaaagua

SEQ ID NO: 797 - RNA, 17 nt, Homo sapiens
uuuugcuuuuaaaguaa

SEQ ID NO: 798 - RNA, 17 nt, Homo sapiens
uuugcuuuuaaaguaau

SEQ ID NO: 799 - RNA, 17 nt, Homo sapiens
uugcuuuuaaaguaauu

SEQ ID NO: 800 - RNA, 17 nt, Homo sapiens
uuuaaaguaauuuuuga

SEQ ID NO: 801 - RNA, 17 nt, Homo sapiens
aaaguaauuuuugacuc

SEQ ID NO: 802 - RNA, 17 nt, Homo sapiens
aaguaauuuuugacucc

SEQ ID NO: 803 - RNA, 17 nt, Homo sapiens
aguaauuuuugacuccc

SEQ ID NO: 804 - RNA, 17 nt, Homo sapiens
guaauuuuugacuccca

SEQ ID NO: 805 - RNA, 17 nt, Homo sapiens
uuuugacucccagauca

SEQ ID NO: 806 - RNA, 17 nt, Homo sapiens
ucccagaucagucagag

SEQ ID NO: 807 - RNA, 17 nt, Homo sapiens
agaucagucagagcccc

SEQ ID NO: 808 - RNA, 17 nt, Homo sapiens
gagccccuacagcauug

SEQ ID NO: 809 - RNA, 17 nt, Homo sapiens
uacagcauuguuaagaa

SEQ ID NO: 810 - RNA, 17 nt, Homo sapiens
agcauuguuaagaaagu

SEQ ID NO: 811 - RNA, 17 nt, Homo sapiens
gcauuguuaagaaagua

SEQ ID NO: 812 - RNA, 17 nt, Homo sapiens
aagaaaguauuugauuu

SEQ ID NO: 813 - RNA, 17 nt, Homo sapiens
gaaaguauuugauuuuu

SEQ ID NO: 814 - RNA, 17 nt, Homo sapiens
aaaguauuugauuuuug

SEQ ID NO: 815 - RNA, 17 nt, Homo sapiens
uauuugauuuuugucuc

SEQ ID NO: 816 - RNA, 17 nt, Homo sapiens
auuugauuuuugucuca

SEQ ID NO: 817 - RNA, 17 nt, Homo sapiens
uuugauuuuugucucaa

SEQ ID NO: 818 - RNA, 17 nt, Homo sapiens
uugauuuuugucucaau

SEQ ID NO: 819 - RNA, 17 nt, Homo sapiens
auuuuugucucaaugaa

SEQ ID NO: 820 - RNA, 17 nt, Homo sapiens
uuuugucucaaugaaaa

SEQ ID NO: 821 - RNA, 17 nt, Homo sapiens
augaaaauaaaacuaua

SEQ ID NO: 822 - RNA, 17 nt, Homo sapiens
auaaaacuauauucauu

SEQ ID NO: 823 - RNA, 17 nt, Homo sapiens
aaaacuauauucauuuc

SEQ ID NO: 824 - RNA, 17 nt, Homo sapiens
cgcugcgccggaguccc

SEQ ID NO: 825 - RNA, 17 nt, Homo sapiens
ccggagucccgagcuag

SEQ ID NO: 826 - RNA, 17 nt, Homo sapiens
cggagucccgagcuagc

SEQ ID NO: 827 - RNA, 17 nt, Homo sapiens
ucccgagcuagccccgg

SEQ ID NO: 828 - RNA, 17 nt, Homo sapiens
gagcuagccccggcgcc

SEQ ID NO: 829 - RNA, 17 nt, Homo sapiens
agcuagccccggcgccg

SEQ ID NO: 830 - RNA, 17 nt, Homo sapiens
gcuagccccggcgccgc

SEQ ID NO: 831 - RNA, 17 nt, Homo sapiens
cccggcgccgccgccgc

SEQ ID NO: 832 - RNA, 17 nt, Homo sapiens
ggcgccgccgccgccca

SEQ ID NO: 833 - RNA, 17 nt, Homo sapiens
gccgccgccgcccagac

SEQ ID NO: 834 - RNA, 17 nt, Homo sapiens
gccgccgcccagaccgg

SEQ ID NO: 835 - RNA, 17 nt, Homo sapiens
ccgccgcccagaccgga

SEQ ID NO: 836 - RNA, 17 nt, Homo sapiens
cgccgcccagaccggac

SEQ ID NO: 837 - RNA, 17 nt, Homo sapiens
gcccagaccggacgaca

SEQ ID NO: 838 - RNA, 17 nt, Homo sapiens
cggacgacaggccaccu

SEQ ID NO: 839 - RNA, 17 nt, Homo sapiens
cgacaggccaccucguc

SEQ ID NO: 840 - RNA, 17 nt, Homo sapiens
gacaggccaccucgucg

SEQ ID NO: 841 - RNA, 17 nt, Homo sapiens
caggccaccucgucggc

SEQ ID NO: 842 - RNA, 17 nt, Homo sapiens
aggccaccucgucggcg

SEQ ID NO: 843 - RNA, 17 nt, Homo sapiens
ucggcguccgcccgagu

SEQ ID NO: 844 - RNA, 17 nt, Homo sapiens
gcguccgcccgaguccc

SEQ ID NO: 845 - RNA, 17 nt, Homo sapiens
cguccgcccgagucccc

SEQ ID NO: 846 - RNA, 17 nt, Homo sapiens
cccgaguccccgccucg

SEQ ID NO: 847 - RNA, 17 nt, Homo sapiens
ccgaguccccgccucgc

SEQ ID NO: 848 - RNA, 17 nt, Homo sapiens
cgaguccccgccucgcc

SEQ ID NO: 849 - RNA, 17 nt, Homo sapiens
guccccgccucgccgcc

SEQ ID NO: 850 - RNA, 17 nt, Homo sapiens
uccccgccucgccgcca

SEQ ID NO: 851 - RNA, 17 nt, Homo sapiens
cgccucgccgccaacgc

SEQ ID NO: 852 - RNA, 17 nt, Homo sapiens
cucgccgccaacgccac

SEQ ID NO: 853 - RNA, 17 nt, Homo sapiens
ucgccgccaacgccaca

SEQ ID NO: 854 - RNA, 17 nt, Homo sapiens
gccaacgccacaaccac

SEQ ID NO: 855 - RNA, 17 nt, Homo sapiens
ccaacgccacaaccacc

SEQ ID NO: 856 - RNA, 17 nt, Homo sapiens
aacgccacaaccaccgc

SEQ ID NO: 857 - RNA, 17 nt, Homo sapiens
gccacaaccaccgcgca

SEQ ID NO: 858 - RNA, 17 nt, Homo sapiens
ccacaaccaccgcgcac

SEQ ID NO: 859 - RNA, 17 nt, Homo sapiens
acaaccaccgcgcacgg

SEQ ID NO: 860 - RNA, 17 nt, Homo sapiens
caccgcgcacggccccc

SEQ ID NO: 861 - RNA, 17 nt, Homo sapiens
cgcacggcccccugacu

SEQ ID NO: 862 - RNA, 17 nt, Homo sapiens
gcacggcccccugacuc

SEQ ID NO: 863 - RNA, 17 nt, Homo sapiens
cacggcccccugacucc

SEQ ID NO: 864 - RNA, 17 nt, Homo sapiens
acggcccccugacuccg

SEQ ID NO: 865 - RNA, 17 nt, Homo sapiens
cggcccccugacuccgu

SEQ ID NO: 866 - RNA, 17 nt, Homo sapiens
ccccugacuccguccag

SEQ ID NO: 867 - RNA, 17 nt, Homo sapiens
ccugacuccguccagua

SEQ ID NO: 868 - RNA, 17 nt, Homo sapiens
acuccguccaguauuga

SEQ ID NO: 869 - RNA, 17 nt, Homo sapiens
cuccguccaguauugau

SEQ ID NO: 870 - RNA, 17 nt, Homo sapiens
gggagagccggagcgag

SEQ ID NO: 871 - RNA, 17 nt, Homo sapiens
gagcgagcucuucgggg

SEQ ID NO: 872 - RNA, 17 nt, Homo sapiens
gcgagcucuucggggag

SEQ ID NO: 873 - RNA, 17 nt, Homo sapiens
cggggagcagcgaugcg

SEQ ID NO: 874 - RNA, 17 nt, Homo sapiens
gaugcgacccuccggga

SEQ ID NO: 875 - RNA, 17 nt, Homo sapiens
augcgacccuccgggac

SEQ ID NO: 876 - RNA, 17 nt, Homo sapiens
ugcgacccuccgggacg

SEQ ID NO: 877 - RNA, 17 nt, Homo sapiens
cgacccuccgggacggc

SEQ ID NO: 878 - RNA, 17 nt, Homo sapiens
gggacggccggggcagc

SEQ ID NO: 879 - RNA, 17 nt, Homo sapiens
gccggggcagcgcuccu

SEQ ID NO: 880 - RNA, 17 nt, Homo sapiens
ggcagcgcuccuggcgc

SEQ ID NO: 881 - RNA, 17 nt, Homo sapiens
cagcgcuccuggcgcug

SEQ ID NO: 882 - RNA, 17 nt, Homo sapiens
agcgcuccuggcgcugc

SEQ ID NO: 883 - RNA, 17 nt, Homo sapiens
ccuggcgcugcuggcug

SEQ ID NO: 884 - RNA, 17 nt, Homo sapiens
ggcgcugcuggcugcgc

SEQ ID NO: 885 - RNA, 17 nt, Homo sapiens
cugcuggcugcgcucug

SEQ ID NO: 886 - RNA, 17 nt, Homo sapiens
ggcugcgcucugcccgg

SEQ ID NO: 887 - RNA, 17 nt, Homo sapiens
cugcgcucugcccggcg

SEQ ID NO: 888 - RNA, 17 nt, Homo sapiens
cgcucugcccggcgagu

SEQ ID NO: 889 - RNA, 17 nt, Homo sapiens
gcucugcccggcgaguc

SEQ ID NO: 890 - RNA, 17 nt, Homo sapiens
agucgggcucuggagga

SEQ ID NO: 891 - RNA, 17 nt, Homo sapiens
ucgggcucuggaggaaa

SEQ ID NO: 892 - RNA, 17 nt, Homo sapiens
aaguuugccaaggcacg

SEQ ID NO: 893 - RNA, 17 nt, Homo sapiens
aguuugccaaggcacga

SEQ ID NO: 894 - RNA, 17 nt, Homo sapiens
gccaaggcacgaguaac

SEQ ID NO: 895 - RNA, 17 nt, Homo sapiens
cgaguaacaagcucacg

SEQ ID NO: 896 - RNA, 17 nt, Homo sapiens
uaacaagcucacgcagu

SEQ ID NO: 897 - RNA, 17 nt, Homo sapiens
acaagcucacgcaguug

SEQ ID NO: 898 - RNA, 17 nt, Homo sapiens
gcucacgcaguugggca

SEQ ID NO: 899 - RNA, 17 nt, Homo sapiens
aguugggcacuuuugaa

SEQ ID NO: 900 - RNA, 17 nt, Homo sapiens
uugggcacuuuugaaga

SEQ ID NO: 901 - RNA, 17 nt, Homo sapiens
ugaagaucauuuucuca

SEQ ID NO: 902 - RNA, 17 nt, Homo sapiens
ucauuuucucagccucc

SEQ ID NO: 903 - RNA, 17 nt, Homo sapiens
auuuucucagccuccag

SEQ ID NO: 904 - RNA, 17 nt, Homo sapiens
uucucagccuccagagg

SEQ ID NO: 905 - RNA, 17 nt, Homo sapiens
ucucagccuccagagga

SEQ ID NO: 906 - RNA, 17 nt, Homo sapiens
ucagccuccagaggaug

SEQ ID NO: 907 - RNA, 17 nt, Homo sapiens
cagccuccagaggaugu

SEQ ID NO: 908 - RNA, 17 nt, Homo sapiens
ggauguucaauaacugu

SEQ ID NO: 909 - RNA, 17 nt, Homo sapiens
ucaauaacugugaggug

SEQ ID NO: 910 - RNA, 17 nt, Homo sapiens
aggugguccuugggaau

SEQ ID NO: 911 - RNA, 17 nt, Homo sapiens
ggugguccuugggaauu

SEQ ID NO: 912 - RNA, 17 nt, Homo sapiens
gaaauuaccuaugugca

SEQ ID NO: 913 - RNA, 17 nt, Homo sapiens
aaauuaccuaugugcag

SEQ ID NO: 914 - RNA, 17 nt, Homo sapiens
cuaugugcagaggaauu

SEQ ID NO: 915 - RNA, 17 nt, Homo sapiens
uuaugaucuuuccuucu

SEQ ID NO: 916 - RNA, 17 nt, Homo sapiens
gaucuuuccuucuuaaa

SEQ ID NO: 917 - RNA, 17 nt, Homo sapiens
aucuuuccuucuuaaag

SEQ ID NO: 918 - RNA, 17 nt, Homo sapiens
uuuccuucuuaaagacc

SEQ ID NO: 919 - RNA, 17 nt, Homo sapiens
uuaaagaccauccagga

SEQ ID NO: 920 - RNA, 17 nt, Homo sapiens
uaaagaccauccaggag

SEQ ID NO: 921 - RNA, 17 nt, Homo sapiens
agaccauccaggaggug

SEQ ID NO: 922 - RNA, 17 nt, Homo sapiens
gaccauccaggaggugg

SEQ ID NO: 923 - RNA, 17 nt, Homo sapiens
gagguggcugguuaugu

SEQ ID NO: 924 - RNA, 17 nt, Homo sapiens
guuauguccucauugcc

SEQ ID NO: 925 - RNA, 17 nt, Homo sapiens
uuauguccucauugccc

SEQ ID NO: 926 - RNA, 17 nt, Homo sapiens
auguccucauugcccuc

SEQ ID NO: 927 - RNA, 17 nt, Homo sapiens
cucauugcccucaacac

SEQ ID NO: 928 - RNA, 17 nt, Homo sapiens
ucauugcccucaacaca

SEQ ID NO: 929 - RNA, 17 nt, Homo sapiens
cauugcccucaacacag

SEQ ID NO: 930 - RNA, 17 nt, Homo sapiens
uugcccucaacacagug

SEQ ID NO: 931 - RNA, 17 nt, Homo sapiens
cccucaacacaguggag

SEQ ID NO: 932 - RNA, 17 nt, Homo sapiens
cucaacacaguggagcg

SEQ ID NO: 933 - RNA, 17 nt, Homo sapiens
gcgaauuccuuuggaaa

SEQ ID NO: 934 - RNA, 17 nt, Homo sapiens
cgaauuccuuuggaaaa

SEQ ID NO: 935 - RNA, 17 nt, Homo sapiens
uggaaaaccugcagauc

SEQ ID NO: 936 - RNA, 17 nt, Homo sapiens
ggaaaaccugcagauca

SEQ ID NO: 937 - RNA, 17 nt, Homo sapiens
aaaccugcagaucauca

SEQ ID NO: 938 - RNA, 17 nt, Homo sapiens
ugcagaucaucagagga

SEQ ID NO: 939 - RNA, 17 nt, Homo sapiens
agaucaucagaggaaau

SEQ ID NO: 940 - RNA, 17 nt, Homo sapiens
auauguacuacgaaaau

SEQ ID NO: 941 - RNA, 17 nt, Homo sapiens
gaaaauuccuaugccuu

SEQ ID NO: 942 - RNA, 17 nt, Homo sapiens
aaaauuccuaugccuua

SEQ ID NO: 943 - RNA, 17 nt, Homo sapiens
uccuaugccuuagcagu

SEQ ID NO: 944 - RNA, 17 nt, Homo sapiens
ccuaugccuuagcaguc

SEQ ID NO: 945 - RNA, 17 nt, Homo sapiens
gccuuagcagucuuauc

SEQ ID NO: 946 - RNA, 17 nt, Homo sapiens
uagcagucuuaucuaac

SEQ ID NO: 947 - RNA, 17 nt, Homo sapiens
gucuuaucuaacuauga

SEQ ID NO: 948 - RNA, 17 nt, Homo sapiens
uaucuaacuaugaugca

SEQ ID NO: 949 - RNA, 17 nt, Homo sapiens
uaugaugcaaauaaaac

SEQ ID NO: 950 - RNA, 17 nt, Homo sapiens
aauaaaaccggacugaa

SEQ ID NO: 951 - RNA, 17 nt, Homo sapiens
aaccggacugaaggagc

SEQ ID NO: 952 - RNA, 17 nt, Homo sapiens
gaaggagcugcccauga

SEQ ID NO: 953 - RNA, 17 nt, Homo sapiens
ggagcugcccaugagaa

SEQ ID NO: 954 - RNA, 17 nt, Homo sapiens
gagcugcccaugagaaa

SEQ ID NO: 955 - RNA, 17 nt, Homo sapiens
agcugcccaugagaaau

SEQ ID NO: 956 - RNA, 17 nt, Homo sapiens
aaauuuacaggaaaucc

SEQ ID NO: 957 - RNA, 17 nt, Homo sapiens
aggaaauccugcauggc

SEQ ID NO: 958 - RNA, 17 nt, Homo sapiens
ggaaauccugcauggcg

SEQ ID NO: 959 - RNA, 17 nt, Homo sapiens
aauccugcauggcgccg

SEQ ID NO: 960 - RNA, 17 nt, Homo sapiens
cauggcgccgugcgguu

SEQ ID NO: 961 - RNA, 17 nt, Homo sapiens
ugcgguucagcaacaac

SEQ ID NO: 962 - RNA, 17 nt, Homo sapiens
gguucagcaacaacccu

SEQ ID NO: 963 - RNA, 17 nt, Homo sapiens
ucagcaacaacccugcc

SEQ ID NO: 964 - RNA, 17 nt, Homo sapiens
gcaacaacccugcccug

SEQ ID NO: 965 - RNA, 17 nt, Homo sapiens
caacaacccugcccugu

SEQ ID NO: 966 - RNA, 17 nt, Homo sapiens
aacaacccugcccugug

SEQ ID NO: 967 - RNA, 17 nt, Homo sapiens
aacccugcccugugcaa

SEQ ID NO: 968 - RNA, 17 nt, Homo sapiens
acccugcccugugcaac

SEQ ID NO: 969 - RNA, 17 nt, Homo sapiens
cccugcccugugcaacg

SEQ ID NO: 970 - RNA, 17 nt, Homo sapiens
cccugugcaacguggag

SEQ ID NO: 971 - RNA, 17 nt, Homo sapiens
uggagagcauccagugg

SEQ ID NO: 972 - RNA, 17 nt, Homo sapiens
agagcauccaguggcgg

SEQ ID NO: 973 - RNA, 17 nt, Homo sapiens
gagcauccaguggcggg

SEQ ID NO: 974 - RNA, 17 nt, Homo sapiens
ggcgggacauagucagc

SEQ ID NO: 975 - RNA, 17 nt, Homo sapiens
acauagucagcagugac

SEQ ID NO: 976 - RNA, 17 nt, Homo sapiens
uagucagcagugacuuu

SEQ ID NO: 977 - RNA, 17 nt, Homo sapiens
gcagugacuuucucagc

SEQ ID NO: 978 - RNA, 17 nt, Homo sapiens
ugacuuucucagcaaca

SEQ ID NO: 979 - RNA, 17 nt, Homo sapiens
acuuucucagcaacaug

SEQ ID NO: 980 - RNA, 17 nt, Homo sapiens
uucucagcaacaugucg

SEQ ID NO: 981 - RNA, 17 nt, Homo sapiens
ucagcaacaugucgaug

SEQ ID NO: 982 - RNA, 17 nt, Homo sapiens
cgauggacuuccagaac

SEQ ID NO: 983 - RNA, 17 nt, Homo sapiens
uggacuuccagaaccac

SEQ ID NO: 984 - RNA, 17 nt, Homo sapiens
ggacuuccagaaccacc

SEQ ID NO: 985 - RNA, 17 nt, Homo sapiens
uccagaaccaccugggc

SEQ ID NO: 986 - RNA, 17 nt, Homo sapiens
ccagaaccaccugggca

SEQ ID NO: 987 - RNA, 17 nt, Homo sapiens
agaaccaccugggcagc

SEQ ID NO: 988 - RNA, 17 nt, Homo sapiens
gaaccaccugggcagcu

SEQ ID NO: 989 - RNA, 17 nt, Homo sapiens
accugggcagcugccaa

SEQ ID NO: 990 - RNA, 17 nt, Homo sapiens
ugggcagcugccaaaag

SEQ ID NO: 991 - RNA, 17 nt, Homo sapiens
gcagcugccaaaagugu

SEQ ID NO: 992 - RNA, 17 nt, Homo sapiens
cagcugccaaaagugug

SEQ ID NO: 993 - RNA, 17 nt, Homo sapiens
gugugauccaagcuguc

SEQ ID NO: 994 - RNA, 17 nt, Homo sapiens
ugugauccaagcugucc

SEQ ID NO: 995 - RNA, 17 nt, Homo sapiens
auccaagcugucccaau

SEQ ID NO: 996 - RNA, 17 nt, Homo sapiens
aagcugucccaauggga

SEQ ID NO: 997 - RNA, 17 nt, Homo sapiens
agcugucccaaugggag

SEQ ID NO: 998 - RNA, 17 nt, Homo sapiens
gcugucccaaugggagc

SEQ ID NO: 999 - RNA, 17 nt, Homo sapiens
augggagcugcuggggu

SEQ ID NO: 1000 - RNA, 17 nt, Homo sapiens
ggagcugcuggggugca

SEQ ID NO: 1001 - RNA, 17 nt, Homo sapiens
uggggugcaggagagga

SEQ ID NO: 1002 - RNA, 17 nt, Homo sapiens
aggagaacugccagaaa

SEQ ID NO: 1003 - RNA, 17 nt, Homo sapiens
agaacugccagaaacug

SEQ ID NO: 1004 - RNA, 17 nt, Homo sapiens
gaacugccagaaacuga

SEQ ID NO: 1005 - RNA, 17 nt, Homo sapiens
ccagaaacugaccaaaa

SEQ ID NO: 1006 - RNA, 17 nt, Homo sapiens
aaacugaccaaaaucau

SEQ ID NO: 1007 - RNA, 17 nt, Homo sapiens
aacugaccaaaaucauc

SEQ ID NO: 1008 - RNA, 17 nt, Homo sapiens
ccaaaaucaucugugcc

SEQ ID NO: 1009 - RNA, 17 nt, Homo sapiens
aaaucaucugugcccag

SEQ ID NO: 1010 - RNA, 17 nt, Homo sapiens
aucugugcccagcagug

SEQ ID NO: 1011 - RNA, 17 nt, Homo sapiens
ucugugcccagcagugc

SEQ ID NO: 1012 - RNA, 17 nt, Homo sapiens
cugugcccagcagugcu

SEQ ID NO: 1013 - RNA, 17 nt, Homo sapiens
ugcccagcagugcuccg

SEQ ID NO: 1014 - RNA, 17 nt, Homo sapiens
agcagugcuccgggcgc

SEQ ID NO: 1015 - RNA, 17 nt, Homo sapiens
cagugcuccgggcgcug

SEQ ID NO: 1016 - RNA, 17 nt, Homo sapiens
ccgggcgcugccguggc

SEQ ID NO: 1017 - RNA, 17 nt, Homo sapiens
ggcgcugccguggcaag

SEQ ID NO: 1018 - RNA, 17 nt, Homo sapiens
gccguggcaaguccccc

SEQ ID NO: 1019 - RNA, 17 nt, Homo sapiens
ggcaagucccccaguga

SEQ ID NO: 1020 - RNA, 17 nt, Homo sapiens
gcaagucccccagugac

SEQ ID NO: 1021 - RNA, 17 nt, Homo sapiens
caagucccccagugacu

SEQ ID NO: 1022 - RNA, 17 nt, Homo sapiens
aagucccccagugacug

SEQ ID NO: 1023 - RNA, 17 nt, Homo sapiens
agucccccagugacugc

SEQ ID NO: 1024 - RNA, 17 nt, Homo sapiens
ccagugacugcugccac

SEQ ID NO: 1025 - RNA, 17 nt, Homo sapiens
gugacugcugccacaac

SEQ ID NO: 1026 - RNA, 17 nt, Homo sapiens
acugcugccacaaccag

SEQ ID NO: 1027 - RNA, 17 nt, Homo sapiens
cugcugccacaaccagu

SEQ ID NO: 1028 - RNA, 17 nt, Homo sapiens
gcugccacaaccagugu

SEQ ID NO: 1029 - RNA, 17 nt, Homo sapiens
gccacaaccagugugcu

SEQ ID NO: 1030 - RNA, 17 nt, Homo sapiens
ccacaaccagugugcug

SEQ ID NO: 1031 - RNA, 17 nt, Homo sapiens
cagugugcugcaggcug

SEQ ID NO: 1032 - RNA, 17 nt, Homo sapiens
ugugcugcaggcugcac

SEQ ID NO: 1033 - RNA, 17 nt, Homo sapiens
cugcaggcugcacaggc

SEQ ID NO: 1034 - RNA, 17 nt, Homo sapiens
caggcugcacaggcccc

SEQ ID NO: 1035 - RNA, 17 nt, Homo sapiens
ggcugcacaggcccccg

SEQ ID NO: 1036 - RNA, 17 nt, Homo sapiens
gcacaggcccccgggag

SEQ ID NO: 1037 - RNA, 17 nt, Homo sapiens
cacaggcccccgggaga

SEQ ID NO: 1038 - RNA, 17 nt, Homo sapiens
acaggcccccgggagag

SEQ ID NO: 1039 - RNA, 17 nt, Homo sapiens
caggcccccgggagagc

SEQ ID NO: 1040 - RNA, 17 nt, Homo sapiens
agagcgacugccugguc

SEQ ID NO: 1041 - RNA, 17 nt, Homo sapiens
gcgacugccuggucugc

SEQ ID NO: 1042 - RNA, 17 nt, Homo sapiens
cgacugccuggucugcc

SEQ ID NO: 1043 - RNA, 17 nt, Homo sapiens
gccuggucugccgcaaa

SEQ ID NO: 1044 - RNA, 17 nt, Homo sapiens
uggucugccgcaaauuc

SEQ ID NO: 1045 - RNA, 17 nt, Homo sapiens
ucugccgcaaauuccga

SEQ ID NO: 1046 - RNA, 17 nt, Homo sapiens
gcaaauuccgagacgaa

SEQ ID NO: 1047 - RNA, 17 nt, Homo sapiens
gacgaagccacgugcaa

SEQ ID NO: 1048 - RNA, 17 nt, Homo sapiens
acgaagccacgugcaag

SEQ ID NO: 1049 - RNA, 17 nt, Homo sapiens
ccacgugcaaggacacc

SEQ ID NO: 1050 - RNA, 17 nt, Homo sapiens
gcaaggacaccugcccc

SEQ ID NO: 1051 - RNA, 17 nt, Homo sapiens
aaggacaccugcccccc

SEQ ID NO: 1052 - RNA, 17 nt, Homo sapiens
aggacaccugcccccca

SEQ ID NO: 1053 - RNA, 17 nt, Homo sapiens
acaccugccccccacuc

SEQ ID NO: 1054 - RNA, 17 nt, Homo sapiens
caccugccccccacuca

SEQ ID NO: 1055 - RNA, 17 nt, Homo sapiens
accugccccccacucau

SEQ ID NO: 1056 - RNA, 17 nt, Homo sapiens
ccugccccccacucaug

SEQ ID NO: 1057 - RNA, 17 nt, Homo sapiens
cugccccccacucaugc

SEQ ID NO: 1058 - RNA, 17 nt, Homo sapiens
ugccccccacucaugcu

SEQ ID NO: 1059 - RNA, 17 nt, Homo sapiens
ccccccacucaugcucu

SEQ ID NO: 1060 - RNA, 17 nt, Homo sapiens
ccccacucaugcucuac

SEQ ID NO: 1061 - RNA, 17 nt, Homo sapiens
acucaugcucuacaacc

SEQ ID NO: 1062 - RNA, 17 nt, Homo sapiens
ucaugcucuacaacccc

SEQ ID NO: 1063 - RNA, 17 nt, Homo sapiens
ugcucuacaaccccacc

SEQ ID NO: 1064 - RNA, 17 nt, Homo sapiens
ucuacaaccccaccacg

SEQ ID NO: 1065 - RNA, 17 nt, Homo sapiens
cuacaaccccaccacgu

SEQ ID NO: 1066 - RNA, 17 nt, Homo sapiens
uacaaccccaccacgua

SEQ ID NO: 1067 - RNA, 17 nt, Homo sapiens
acaaccccaccacguac

SEQ ID NO: 1068 - RNA, 17 nt, Homo sapiens
aaccccaccacguacca

SEQ ID NO: 1069 - RNA, 17 nt, Homo sapiens
accccaccacguaccag

SEQ ID NO: 1070 - RNA, 17 nt, Homo sapiens
ccacguaccagauggau

SEQ ID NO: 1071 - RNA, 17 nt, Homo sapiens
cacguaccagauggaug

SEQ ID NO: 1072 - RNA, 17 nt, Homo sapiens
augugaaccccgagggc

SEQ ID NO: 1073 - RNA, 17 nt, Homo sapiens
ugugaaccccgagggca

SEQ ID NO: 1074 - RNA, 17 nt, Homo sapiens
gugaaccccgagggcaa

SEQ ID NO: 1075 - RNA, 17 nt, Homo sapiens
ccgagggcaaauacagc

SEQ ID NO: 1076 - RNA, 17 nt, Homo sapiens
gcaaauacagcuuuggu

SEQ ID NO: 1077 - RNA, 17 nt, Homo sapiens
aauacagcuuuggugcc

SEQ ID NO: 1078 - RNA, 17 nt, Homo sapiens
uuuggugccaccugcgu

SEQ ID NO: 1079 - RNA, 17 nt, Homo sapiens
uuggugccaccugcgug

SEQ ID NO: 1080 - RNA, 17 nt, Homo sapiens
ggugccaccugcgugaa

SEQ ID NO: 1081 - RNA, 17 nt, Homo sapiens
gugccaccugcgugaag

SEQ ID NO: 1082 - RNA, 17 nt, Homo sapiens
gaaguguccccguaauu

SEQ ID NO: 1083 - RNA, 17 nt, Homo sapiens
aaguguccccguaauua

SEQ ID NO: 1084 - RNA, 17 nt, Homo sapiens
aguguccccguaauuau

SEQ ID NO: 1085 - RNA, 17 nt, Homo sapiens
guggugacagaucacgg

SEQ ID NO: 1086 - RNA, 17 nt, Homo sapiens
gacagaucacggcucgu

SEQ ID NO: 1087 - RNA, 17 nt, Homo sapiens
aucacggcucgugcguc

SEQ ID NO: 1088 - RNA, 17 nt, Homo sapiens
cgugcguccgagccugu

SEQ ID NO: 1089 - RNA, 17 nt, Homo sapiens
guccgagccuguggggc

SEQ ID NO: 1090 - RNA, 17 nt, Homo sapiens
uccgagccuguggggcc

SEQ ID NO: 1091 - RNA, 17 nt, Homo sapiens
uguggggccgacagcua

SEQ ID NO: 1092 - RNA, 17 nt, Homo sapiens
gggccgacagcuaugag

SEQ ID NO: 1093 - RNA, 17 nt, Homo sapiens
ccgacagcuaugagaug

SEQ ID NO: 1094 - RNA, 17 nt, Homo sapiens
acggcguccgcaagugu

SEQ ID NO: 1095 - RNA, 17 nt, Homo sapiens
gcguccgcaaguguaag

SEQ ID NO: 1096 - RNA, 17 nt, Homo sapiens
cgaagggccuugccgca

SEQ ID NO: 1097 - RNA, 17 nt, Homo sapiens
gaagggccuugccgcaa

SEQ ID NO: 1098 - RNA, 17 nt, Homo sapiens
ggccuugccgcaaagug

SEQ ID NO: 1099 - RNA, 17 nt, Homo sapiens
cuugccgcaaagugugu

SEQ ID NO: 1100 - RNA, 17 nt, Homo sapiens
uuaaagacucacucucc

SEQ ID NO: 1101 - RNA, 17 nt, Homo sapiens
aaagacucacucuccau

SEQ ID NO: 1102 - RNA, 17 nt, Homo sapiens
agacucacucuccauaa

SEQ ID NO: 1103 - RNA, 17 nt, Homo sapiens
acucacucuccauaaau

SEQ ID NO: 1104 - RNA, 17 nt, Homo sapiens
ucacucuccauaaaugc

SEQ ID NO: 1105 - RNA, 17 nt, Homo sapiens
cacucuccauaaaugcu

SEQ ID NO: 1106 - RNA, 17 nt, Homo sapiens
auaaaugcuacgaauau

SEQ ID NO: 1107 - RNA, 17 nt, Homo sapiens
uauuaaacacuucaaaa

SEQ ID NO: 1108 - RNA, 17 nt, Homo sapiens
uuaaacacuucaaaaac

SEQ ID NO: 1109 - RNA, 17 nt, Homo sapiens
aacacuucaaaaacugc

SEQ ID NO: 1110 - RNA, 17 nt, Homo sapiens
ucaaaaacugcaccucc

SEQ ID NO: 1111 - RNA, 17 nt, Homo sapiens
aaaacugcaccuccauc

SEQ ID NO: 1112 - RNA, 17 nt, Homo sapiens
aacugcaccuccaucag

SEQ ID NO: 1113 - RNA, 17 nt, Homo sapiens
acugcaccuccaucagu

SEQ ID NO: 1114 - RNA, 17 nt, Homo sapiens
ugcaccuccaucagugg

SEQ ID NO: 1115 - RNA, 17 nt, Homo sapiens
gcaccuccaucaguggc

SEQ ID NO: 1116 - RNA, 17 nt, Homo sapiens
ccuccaucaguggcgau

SEQ ID NO: 1117 - RNA, 17 nt, Homo sapiens
uggcgaucuccacaucc

SEQ ID NO: 1118 - RNA, 17 nt, Homo sapiens
gcgaucuccacauccug

SEQ ID NO: 1119 - RNA, 17 nt, Homo sapiens
cgaucuccacauccugc

SEQ ID NO: 1120 - RNA, 17 nt, Homo sapiens
aucuccacauccugccg

SEQ ID NO: 1121 - RNA, 17 nt, Homo sapiens
uccacauccugccggug

SEQ ID NO: 1122 - RNA, 17 nt, Homo sapiens
ccacauccugccggugg

SEQ ID NO: 1123 - RNA, 17 nt, Homo sapiens
cauccugccgguggcau

SEQ ID NO: 1124 - RNA, 17 nt, Homo sapiens
ccgguggcauuuagggg

SEQ ID NO: 1125 - RNA, 17 nt, Homo sapiens
ggggugacuccuucaca

SEQ ID NO: 1126 - RNA, 17 nt, Homo sapiens
ggugacuccuucacaca

SEQ ID NO: 1127 - RNA, 17 nt, Homo sapiens
gugacuccuucacacau

SEQ ID NO: 1128 - RNA, 17 nt, Homo sapiens
acuccuucacacauacu

SEQ ID NO: 1129 - RNA, 17 nt, Homo sapiens
uccuucacacauacucc

SEQ ID NO: 1130 - RNA, 17 nt, Homo sapiens
cuucacacauacuccuc

SEQ ID NO: 1131 - RNA, 17 nt, Homo sapiens
acacauacuccuccucu

SEQ ID NO: 1132 - RNA, 17 nt, Homo sapiens
acauacuccuccucugg

SEQ ID NO: 1133 - RNA, 17 nt, Homo sapiens
cauacuccuccucugga

SEQ ID NO: 1134 - RNA, 17 nt, Homo sapiens
uacuccuccucuggauc

SEQ ID NO: 1135 - RNA, 17 nt, Homo sapiens
acuccuccucuggaucc

SEQ ID NO: 1136 - RNA, 17 nt, Homo sapiens
uccuccucuggauccac

SEQ ID NO: 1137 - RNA, 17 nt, Homo sapiens
ucuggauccacaggaac

SEQ ID NO: 1138 - RNA, 17 nt, Homo sapiens
cuggauccacaggaacu

SEQ ID NO: 1139 - RNA, 17 nt, Homo sapiens
ggauccacaggaacugg

SEQ ID NO: 1140 - RNA, 17 nt, Homo sapiens
acaggaacuggauauuc

SEQ ID NO: 1141 - RNA, 17 nt, Homo sapiens
ggauauucugaaaaccg

SEQ ID NO: 1142 - RNA, 17 nt, Homo sapiens
cugaaaaccguaaagga

SEQ ID NO: 1143 - RNA, 17 nt, Homo sapiens
aggaaaucacaggguuu

SEQ ID NO: 1144 - RNA, 17 nt, Homo sapiens
gaaaucacaggguuuuu

SEQ ID NO: 1145 - RNA, 17 nt, Homo sapiens
guuuuugcugauucagg

SEQ ID NO: 1146 - RNA, 17 nt, Homo sapiens
gcugauucaggcuuggc

SEQ ID NO: 1147 - RNA, 17 nt, Homo sapiens
auucaggcuuggccuga

SEQ ID NO: 1148 - RNA, 17 nt, Homo sapiens
ggcuuggccugaaaaca

SEQ ID NO: 1149 - RNA, 17 nt, Homo sapiens
gcuuggccugaaaacag

SEQ ID NO: 1150 - RNA, 17 nt, Homo sapiens
cugaaaacaggacggac

SEQ ID NO: 1151 - RNA, 17 nt, Homo sapiens
ggacggaccuccaugcc

SEQ ID NO: 1152 - RNA, 17 nt, Homo sapiens
gacggaccuccaugccu

SEQ ID NO: 1153 - RNA, 17 nt, Homo sapiens
cggaccuccaugccuuu

SEQ ID NO: 1154 - RNA, 17 nt, Homo sapiens
ggaccuccaugccuuug

SEQ ID NO: 1155 - RNA, 17 nt, Homo sapiens
cuccaugccuuugagaa

SEQ ID NO: 1156 - RNA, 17 nt, Homo sapiens
uccaugccuuugagaac

SEQ ID NO: 1157 - RNA, 17 nt, Homo sapiens
uugagaaccuagaaauc

SEQ ID NO: 1158 - RNA, 17 nt, Homo sapiens
ugagaaccuagaaauca

SEQ ID NO: 1159 - RNA, 17 nt, Homo sapiens
uagaaaucauacgcggc

SEQ ID NO: 1160 - RNA, 17 nt, Homo sapiens
uacgcggcaggaccaag

SEQ ID NO: 1161 - RNA, 17 nt, Homo sapiens
ggcaggaccaagcaaca

SEQ ID NO: 1162 - RNA, 17 nt, Homo sapiens
gcaggaccaagcaacau

SEQ ID NO: 1163 - RNA, 17 nt, Homo sapiens
gaccaagcaacaugguc

SEQ ID NO: 1164 - RNA, 17 nt, Homo sapiens
caagcaacauggucagu

SEQ ID NO: 1165 - RNA, 17 nt, Homo sapiens
acauggucaguuuucuc

SEQ ID NO: 1166 - RNA, 17 nt, Homo sapiens
caguuuucucuugcagu

SEQ ID NO: 1167 - RNA, 17 nt, Homo sapiens
guuuucucuugcagucg

SEQ ID NO: 1168 - RNA, 17 nt, Homo sapiens
ucucuugcagucgucag

SEQ ID NO: 1169 - RNA, 17 nt, Homo sapiens
cagucgucagccugaac

SEQ ID NO: 1170 - RNA, 17 nt, Homo sapiens
ucgucagccugaacaua

SEQ ID NO: 1171 - RNA, 17 nt, Homo sapiens
cgucagccugaacauaa

SEQ ID NO: 1172 - RNA, 17 nt, Homo sapiens
gccugaacauaacaucc

SEQ ID NO: 1173 - RNA, 17 nt, Homo sapiens
aacauaacauccuuggg

SEQ ID NO: 1174 - RNA, 17 nt, Homo sapiens
auaacauccuugggauu

SEQ ID NO: 1175 - RNA, 17 nt, Homo sapiens
uaacauccuugggauua

SEQ ID NO: 1176 - RNA, 17 nt, Homo sapiens
gauuacgcucccucaag

SEQ ID NO: 1177 - RNA, 17 nt, Homo sapiens
uuacgcucccucaagga

SEQ ID NO: 1178 - RNA, 17 nt, Homo sapiens
uacgcucccucaaggag

SEQ ID NO: 1179 - RNA, 17 nt, Homo sapiens
acgcucccucaaggaga

SEQ ID NO: 1180 - RNA, 17 nt, Homo sapiens
gcucccucaaggagaua

SEQ ID NO: 1181 - RNA, 17 nt, Homo sapiens
auaauuucaggaaacaa

SEQ ID NO: 1182 - RNA, 17 nt, Homo sapiens
caggaaacaaaaauuug

SEQ ID NO: 1183 - RNA, 17 nt, Homo sapiens
auuugugcuaugcaaau

SEQ ID NO: 1184 - RNA, 17 nt, Homo sapiens
ugcuaugcaaauacaau

SEQ ID NO: 1185 - RNA, 17 nt, Homo sapiens
gcaaauacaauaaacug

SEQ ID NO: 1186 - RNA, 17 nt, Homo sapiens
caauaaacuggaaaaaa

SEQ ID NO: 1187 - RNA, 17 nt, Homo sapiens
gaaaaaacuguuuggga

SEQ ID NO: 1188 - RNA, 17 nt, Homo sapiens
uuugggaccuccgguca

SEQ ID NO: 1189 - RNA, 17 nt, Homo sapiens
uugggaccuccggucag

SEQ ID NO: 1190 - RNA, 17 nt, Homo sapiens
gggaccuccggucagaa

SEQ ID NO: 1191 - RNA, 17 nt, Homo sapiens
cuccggucagaaaacca

SEQ ID NO: 1192 - RNA, 17 nt, Homo sapiens
cagaaaaccaaaauuau

SEQ ID NO: 1193 - RNA, 17 nt, Homo sapiens
agaaaaccaaaauuaua

SEQ ID NO: 1194 - RNA, 17 nt, Homo sapiens
uuauaagcaacagaggu

SEQ ID NO: 1195 - RNA, 17 nt, Homo sapiens
uaagcaacagaggugaa

SEQ ID NO: 1196 - RNA, 17 nt, Homo sapiens
gugaaaacagcugcaag

SEQ ID NO: 1197 - RNA, 17 nt, Homo sapiens
aaaacagcugcaaggcc

SEQ ID NO: 1198 - RNA, 17 nt, Homo sapiens
acagcugcaaggccaca

SEQ ID NO: 1199 - RNA, 17 nt, Homo sapiens
ugcaaggccacaggcca

SEQ ID NO: 1200 - RNA, 17 nt, Homo sapiens
gcaaggccacaggccag

SEQ ID NO: 1201 - RNA, 17 nt, Homo sapiens
aaggccacaggccaggu

SEQ ID NO: 1202 - RNA, 17 nt, Homo sapiens
ccacaggccaggucugc

SEQ ID NO: 1203 - RNA, 17 nt, Homo sapiens
cacaggccaggucugcc

SEQ ID NO: 1204 - RNA, 17 nt, Homo sapiens
gccaggucugccaugcc

SEQ ID NO: 1205 - RNA, 17 nt, Homo sapiens
aggucugccaugccuug

SEQ ID NO: 1206 - RNA, 17 nt, Homo sapiens
ggucugccaugccuugu

SEQ ID NO: 1207 - RNA, 17 nt, Homo sapiens
ugccaugccuugugcuc

SEQ ID NO: 1208 - RNA, 17 nt, Homo sapiens
gccaugccuugugcucc

SEQ ID NO: 1209 - RNA, 17 nt, Homo sapiens
ccuugugcucccccgag

SEQ ID NO: 1210 - RNA, 17 nt, Homo sapiens
uugugcucccccgaggg

SEQ ID NO: 1211 - RNA, 17 nt, Homo sapiens
ugugcucccccgagggc

SEQ ID NO: 1212 - RNA, 17 nt, Homo sapiens
gugcucccccgagggcu

SEQ ID NO: 1213 - RNA, 17 nt, Homo sapiens
ugcucccccgagggcug

SEQ ID NO: 1214 - RNA, 17 nt, Homo sapiens
ccgagggcugcuggggc

SEQ ID NO: 1215 - RNA, 17 nt, Homo sapiens
agggcugcuggggcccg

SEQ ID NO: 1216 - RNA, 17 nt, Homo sapiens
gcuggggcccggagccc

SEQ ID NO: 1217 - RNA, 17 nt, Homo sapiens
cuggggcccggagccca

SEQ ID NO: 1218 - RNA, 17 nt, Homo sapiens
cccggagcccagggacu

SEQ ID NO: 1219 - RNA, 17 nt, Homo sapiens
ccggagcccagggacug

SEQ ID NO: 1220 - RNA, 17 nt, Homo sapiens
cggagcccagggacugc

SEQ ID NO: 1221 - RNA, 17 nt, Homo sapiens
ccagggacugcgucucu

SEQ ID NO: 1222 - RNA, 17 nt, Homo sapiens
acugcgucucuugccgg

SEQ ID NO: 1223 - RNA, 17 nt, Homo sapiens
ugcgucucuugccggaa

SEQ ID NO: 1224 - RNA, 17 nt, Homo sapiens
ucucuugccggaauguc

SEQ ID NO: 1225 - RNA, 17 nt, Homo sapiens
ggaaugucagccgaggc

SEQ ID NO: 1226 - RNA, 17 nt, Homo sapiens
augucagccgaggcagg

SEQ ID NO: 1227 - RNA, 17 nt, Homo sapiens
gccgaggcagggaaugc

SEQ ID NO: 1228 - RNA, 17 nt, Homo sapiens
gcguggacaagugcaag

SEQ ID NO: 1229 - RNA, 17 nt, Homo sapiens
acaagugcaagcuucug

SEQ ID NO: 1230 - RNA, 17 nt, Homo sapiens
gugcaagcuucuggagg

SEQ ID NO: 1231 - RNA, 17 nt, Homo sapiens
caagcuucuggagggug

SEQ ID NO: 1232 - RNA, 17 nt, Homo sapiens
gggugagccaagggagu

SEQ ID NO: 1233 - RNA, 17 nt, Homo sapiens
ggugagccaagggaguu

SEQ ID NO: 1234 - RNA, 17 nt, Homo sapiens
uggagaacucugagugc

SEQ ID NO: 1235 - RNA, 17 nt, Homo sapiens
gagaacucugagugcau

SEQ ID NO: 1236 - RNA, 17 nt, Homo sapiens
cugagugcauacagugc

SEQ ID NO: 1237 - RNA, 17 nt, Homo sapiens
gugcauacagugccacc

SEQ ID NO: 1238 - RNA, 17 nt, Homo sapiens
uacagugccacccagag

SEQ ID NO: 1239 - RNA, 17 nt, Homo sapiens
acagugccacccagagu

SEQ ID NO: 1240 - RNA, 17 nt, Homo sapiens
agugccacccagagugc

SEQ ID NO: 1241 - RNA, 17 nt, Homo sapiens
gugccacccagagugcc

SEQ ID NO: 1242 - RNA, 17 nt, Homo sapiens
ugccacccagagugccu

SEQ ID NO: 1243 - RNA, 17 nt, Homo sapiens
cagagugccugccucag

SEQ ID NO: 1244 - RNA, 17 nt, Homo sapiens
agagugccugccucagg

SEQ ID NO: 1245 - RNA, 17 nt, Homo sapiens
gugccugccucaggcca

SEQ ID NO: 1246 - RNA, 17 nt, Homo sapiens
ugccugccucaggccau

SEQ ID NO: 1247 - RNA, 17 nt, Homo sapiens
ccugccucaggccauga

SEQ ID NO: 1248 - RNA, 17 nt, Homo sapiens
ccucaggccaugaacau

SEQ ID NO: 1249 - RNA, 17 nt, Homo sapiens
cucaggccaugaacauc

SEQ ID NO: 1250 - RNA, 17 nt, Homo sapiens
ccaugaacaucaccugc

SEQ ID NO: 1251 - RNA, 17 nt, Homo sapiens
ugaacaucaccugcaca

SEQ ID NO: 1252 - RNA, 17 nt, Homo sapiens
aacaucaccugcacagg

SEQ ID NO: 1253 - RNA, 17 nt, Homo sapiens
acaucaccugcacagga

SEQ ID NO: 1254 - RNA, 17 nt, Homo sapiens
ucaccugcacaggacgg

SEQ ID NO: 1255 - RNA, 17 nt, Homo sapiens
accugcacaggacgggg

SEQ ID NO: 1256 - RNA, 17 nt, Homo sapiens
acggggaccagacaacu

SEQ ID NO: 1257 - RNA, 17 nt, Homo sapiens
cggggaccagacaacug

SEQ ID NO: 1258 - RNA, 17 nt, Homo sapiens
gaccagacaacuguauc

SEQ ID NO: 1259 - RNA, 17 nt, Homo sapiens
cagacaacuguauccag

SEQ ID NO: 1260 - RNA, 17 nt, Homo sapiens
acuguauccagugugcc

SEQ ID NO: 1261 - RNA, 17 nt, Homo sapiens
cuguauccagugugccc

SEQ ID NO: 1262 - RNA, 17 nt, Homo sapiens
cagugugcccacuacau

SEQ ID NO: 1263 - RNA, 17 nt, Homo sapiens
agugugcccacuacauu

SEQ ID NO: 1264 - RNA, 17 nt, Homo sapiens
gugugcccacuacauug

SEQ ID NO: 1265 - RNA, 17 nt, Homo sapiens
gugcccacuacauugac

SEQ ID NO: 1266 - RNA, 17 nt, Homo sapiens
cccacuacauugacggc

SEQ ID NO: 1267 - RNA, 17 nt, Homo sapiens
uugacggcccccacugc

SEQ ID NO: 1268 - RNA, 17 nt, Homo sapiens
ugacggcccccacugcg

SEQ ID NO: 1269 - RNA, 17 nt, Homo sapiens
gacggcccccacugcgu

SEQ ID NO: 1270 - RNA, 17 nt, Homo sapiens
acggcccccacugcguc

SEQ ID NO: 1271 - RNA, 17 nt, Homo sapiens
cggcccccacugcguca

SEQ ID NO: 1272 - RNA, 17 nt, Homo sapiens
gcccccacugcgucaag

SEQ ID NO: 1273 - RNA, 17 nt, Homo sapiens
acugcgucaagaccugc

SEQ ID NO: 1274 - RNA, 17 nt, Homo sapiens
gucaagaccugcccggc

SEQ ID NO: 1275 - RNA, 17 nt, Homo sapiens
ucaagaccugcccggca

SEQ ID NO: 1276 - RNA, 17 nt, Homo sapiens
agaccugcccggcagga

SEQ ID NO: 1277 - RNA, 17 nt, Homo sapiens
gaccugcccggcaggag

SEQ ID NO: 1278 - RNA, 17 nt, Homo sapiens
ugcccggcaggagucau

SEQ ID NO: 1279 - RNA, 17 nt, Homo sapiens
caggagucaugggagaa

SEQ ID NO: 1280 - RNA, 17 nt, Homo sapiens
gagaaaacaacacccug

SEQ ID NO: 1281 - RNA, 17 nt, Homo sapiens
aaaacaacacccugguc

SEQ ID NO: 1282 - RNA, 17 nt, Homo sapiens
aacaacacccuggucug

SEQ ID NO: 1283 - RNA, 17 nt, Homo sapiens
acaacacccuggucugg

SEQ ID NO: 1284 - RNA, 17 nt, Homo sapiens
caacacccuggucugga

SEQ ID NO: 1285 - RNA, 17 nt, Homo sapiens
cccuggucuggaaguac

SEQ ID NO: 1286 - RNA, 17 nt, Homo sapiens
aaguacgcagacgccgg

SEQ ID NO: 1287 - RNA, 17 nt, Homo sapiens
gcagacgccggccaugu

SEQ ID NO: 1288 - RNA, 17 nt, Homo sapiens
acgccggccaugugugc

SEQ ID NO: 1289 - RNA, 17 nt, Homo sapiens
cgccggccaugugugcc

SEQ ID NO: 1290 - RNA, 17 nt, Homo sapiens
augugugccaccugugc

SEQ ID NO: 1291 - RNA, 17 nt, Homo sapiens
ugugugccaccugugcc

SEQ ID NO: 1292 - RNA, 17 nt, Homo sapiens
ugugccaccugugccau

SEQ ID NO: 1293 - RNA, 17 nt, Homo sapiens
gugccaccugugccauc

SEQ ID NO: 1294 - RNA, 17 nt, Homo sapiens
accugugccauccaaac

SEQ ID NO: 1295 - RNA, 17 nt, Homo sapiens
ccugugccauccaaacu

SEQ ID NO: 1296 - RNA, 17 nt, Homo sapiens
gugccauccaaacugca

SEQ ID NO: 1297 - RNA, 17 nt, Homo sapiens
ugccauccaaacugcac

SEQ ID NO: 1298 - RNA, 17 nt, Homo sapiens
auccaaacugcaccuac

SEQ ID NO: 1299 - RNA, 17 nt, Homo sapiens
caaacugcaccuacgga

SEQ ID NO: 1300 - RNA, 17 nt, Homo sapiens
aacugcaccuacggaug

SEQ ID NO: 1301 - RNA, 17 nt, Homo sapiens
acugcaccuacggaugc

SEQ ID NO: 1302 - RNA, 17 nt, Homo sapiens
acggaugcacugggcca

SEQ ID NO: 1303 - RNA, 17 nt, Homo sapiens
ggaugcacugggccagg

SEQ ID NO: 1304 - RNA, 17 nt, Homo sapiens
cacugggccaggucuug

SEQ ID NO: 1305 - RNA, 17 nt, Homo sapiens
acugggccaggucuuga

SEQ ID NO: 1306 - RNA, 17 nt, Homo sapiens
gccaggucuugaaggcu

SEQ ID NO: 1307 - RNA, 17 nt, Homo sapiens
uugaaggcuguccaacg

SEQ ID NO: 1308 - RNA, 17 nt, Homo sapiens
aggcuguccaacgaaug

SEQ ID NO: 1309 - RNA, 17 nt, Homo sapiens
ggcuguccaacgaaugg

SEQ ID NO: 1310 - RNA, 17 nt, Homo sapiens
gaaugggccuaagaucc

SEQ ID NO: 1311 - RNA, 17 nt, Homo sapiens
aaugggccuaagauccc

SEQ ID NO: 1312 - RNA, 17 nt, Homo sapiens
cuaagaucccguccauc

SEQ ID NO: 1313 - RNA, 17 nt, Homo sapiens
uaagaucccguccaucg

SEQ ID NO: 1314 - RNA, 17 nt, Homo sapiens
aucccguccaucgccac

SEQ ID NO: 1315 - RNA, 17 nt, Homo sapiens
ucccguccaucgccacu

SEQ ID NO: 1316 - RNA, 17 nt, Homo sapiens
uccaucgccacugggau

SEQ ID NO: 1317 - RNA, 17 nt, Homo sapiens
ccaucgccacugggaug

SEQ ID NO: 1318 - RNA, 17 nt, Homo sapiens
aucgccacugggauggu

SEQ ID NO: 1319 - RNA, 17 nt, Homo sapiens
gugggggcccuccucuu

SEQ ID NO: 1320 - RNA, 17 nt, Homo sapiens
ugggggcccuccucuug

SEQ ID NO: 1321 - RNA, 17 nt, Homo sapiens
gggggcccuccucuugc

SEQ ID NO: 1322 - RNA, 17 nt, Homo sapiens
gggcccuccucuugcug

SEQ ID NO: 1323 - RNA, 17 nt, Homo sapiens
ggcccuccucuugcugc

SEQ ID NO: 1324 - RNA, 17 nt, Homo sapiens
cccuccucuugcugcug

SEQ ID NO: 1325 - RNA, 17 nt, Homo sapiens
ccucuugcugcuggugg

SEQ ID NO: 1326 - RNA, 17 nt, Homo sapiens
cuugcugcugguggugg

SEQ ID NO: 1327 - RNA, 17 nt, Homo sapiens
gugguggcccuggggau

SEQ ID NO: 1328 - RNA, 17 nt, Homo sapiens
ugguggcccuggggauc

SEQ ID NO: 1329 - RNA, 17 nt, Homo sapiens
gguggcccuggggaucg

SEQ ID NO: 1330 - RNA, 17 nt, Homo sapiens
ggaucggccucuucaug

SEQ ID NO: 1331 - RNA, 17 nt, Homo sapiens
gaucggccucuucaugc

SEQ ID NO: 1332 - RNA, 17 nt, Homo sapiens
ucggccucuucaugcga

SEQ ID NO: 1333 - RNA, 17 nt, Homo sapiens
gccucuucaugcgaagg

SEQ ID NO: 1334 - RNA, 17 nt, Homo sapiens
gaaggcgccacaucguu

SEQ ID NO: 1335 - RNA, 17 nt, Homo sapiens
aaggcgccacaucguuc

SEQ ID NO: 1336 - RNA, 17 nt, Homo sapiens
ggcgccacaucguucgg

SEQ ID NO: 1337 - RNA, 17 nt, Homo sapiens
ggaagcgcacgcugcgg

SEQ ID NO: 1338 - RNA, 17 nt, Homo sapiens
gcgcacgcugcggaggc

SEQ ID NO: 1339 - RNA, 17 nt, Homo sapiens
gcggaggcugcugcagg

SEQ ID NO: 1340 - RNA, 17 nt, Homo sapiens
gaggcugcugcaggaga

SEQ ID NO: 1341 - RNA, 17 nt, Homo sapiens
gcugcugcaggagaggg

SEQ ID NO: 1342 - RNA, 17 nt, Homo sapiens
gagggagcuuguggagc

SEQ ID NO: 1343 - RNA, 17 nt, Homo sapiens
uguggagccucuuacac

SEQ ID NO: 1344 - RNA, 17 nt, Homo sapiens
guggagccucuuacacc

SEQ ID NO: 1345 - RNA, 17 nt, Homo sapiens
ggagccucuuacaccca

SEQ ID NO: 1346 - RNA, 17 nt, Homo sapiens
ccucuuacacccagugg

SEQ ID NO: 1347 - RNA, 17 nt, Homo sapiens
ucuuacacccaguggag

SEQ ID NO: 1348 - RNA, 17 nt, Homo sapiens
cuuacacccaguggaga

SEQ ID NO: 1349 - RNA, 17 nt, Homo sapiens
uuacacccaguggagaa

SEQ ID NO: 1350 - RNA, 17 nt, Homo sapiens
ggagaagcucccaacca

SEQ ID NO: 1351 - RNA, 17 nt, Homo sapiens
agaagcucccaaccaag

SEQ ID NO: 1352 - RNA, 17 nt, Homo sapiens
gaagcucccaaccaagc

SEQ ID NO: 1353 - RNA, 17 nt, Homo sapiens
aagcucccaaccaagcu

SEQ ID NO: 1354 - RNA, 17 nt, Homo sapiens
cucccaaccaagcucuc

SEQ ID NO: 1355 - RNA, 17 nt, Homo sapiens
ucccaaccaagcucucu

SEQ ID NO: 1356 - RNA, 17 nt, Homo sapiens
aaccaagcucucuugag

SEQ ID NO: 1357 - RNA, 17 nt, Homo sapiens
ccaagcucucuugagga

SEQ ID NO: 1358 - RNA, 17 nt, Homo sapiens
aagcucucuugaggauc

SEQ ID NO: 1359 - RNA, 17 nt, Homo sapiens
ugaggaucuugaaggaa

SEQ ID NO: 1360 - RNA, 17 nt, Homo sapiens
aaggaaacugaauucaa

SEQ ID NO: 1361 - RNA, 17 nt, Homo sapiens
cugaauucaaaaagauc

SEQ ID NO: 1362 - RNA, 17 nt, Homo sapiens
aaaagaucaaagugcug

SEQ ID NO: 1363 - RNA, 17 nt, Homo sapiens
caaagugcugggcuccg

SEQ ID NO: 1364 - RNA, 17 nt, Homo sapiens
ugcugggcuccggugcg

SEQ ID NO: 1365 - RNA, 17 nt, Homo sapiens
cugggcuccggugcguu

SEQ ID NO: 1366 - RNA, 17 nt, Homo sapiens
cguucggcacgguguau

SEQ ID NO: 1367 - RNA, 17 nt, Homo sapiens
uaagggacucuggaucc

SEQ ID NO: 1368 - RNA, 17 nt, Homo sapiens
agggacucuggauccca

SEQ ID NO: 1369 - RNA, 17 nt, Homo sapiens
ucuggaucccagaaggu

SEQ ID NO: 1370 - RNA, 17 nt, Homo sapiens
cuggaucccagaaggug

SEQ ID NO: 1371 - RNA, 17 nt, Homo sapiens
uggaucccagaagguga

SEQ ID NO: 1372 - RNA, 17 nt, Homo sapiens
uaaaauucccgucgcua

SEQ ID NO: 1373 - RNA, 17 nt, Homo sapiens
aaaauucccgucgcuau

SEQ ID NO: 1374 - RNA, 17 nt, Homo sapiens
cccgucgcuaucaagga

SEQ ID NO: 1375 - RNA, 17 nt, Homo sapiens
ucgcuaucaaggaauua

SEQ ID NO: 1376 - RNA, 17 nt, Homo sapiens
agagaagcaacaucucc

SEQ ID NO: 1377 - RNA, 17 nt, Homo sapiens
gaagcaacaucuccgaa

SEQ ID NO: 1378 - RNA, 17 nt, Homo sapiens
gcaacaucuccgaaagc

SEQ ID NO: 1379 - RNA, 17 nt, Homo sapiens
aacaucuccgaaagcca

SEQ ID NO: 1380 - RNA, 17 nt, Homo sapiens
ccgaaagccaacaagga

SEQ ID NO: 1381 - RNA, 17 nt, Homo sapiens
cgaaagccaacaaggaa

SEQ ID NO: 1382 - RNA, 17 nt, Homo sapiens
aagccaacaaggaaauc

SEQ ID NO: 1383 - RNA, 17 nt, Homo sapiens
aggaaauccucgaugaa

SEQ ID NO: 1384 - RNA, 17 nt, Homo sapiens
ggaaauccucgaugaag

SEQ ID NO: 1385 - RNA, 17 nt, Homo sapiens
gaugaagccuacgugau

SEQ ID NO: 1386 - RNA, 17 nt, Homo sapiens
augaagccuacgugaug

SEQ ID NO: 1387 - RNA, 17 nt, Homo sapiens
gugauggccagcgugga

SEQ ID NO: 1388 - RNA, 17 nt, Homo sapiens
ugauggccagcguggac

SEQ ID NO: 1389 - RNA, 17 nt, Homo sapiens
gcguggacaacccccac

SEQ ID NO: 1390 - RNA, 17 nt, Homo sapiens
uggacaacccccacgug

SEQ ID NO: 1391 - RNA, 17 nt, Homo sapiens
ggacaacccccacgugu

SEQ ID NO: 1392 - RNA, 17 nt, Homo sapiens
gacaacccccacgugug

SEQ ID NO: 1393 - RNA, 17 nt, Homo sapiens
acaacccccacgugugc

SEQ ID NO: 1394 - RNA, 17 nt, Homo sapiens
caacccccacgugugcc

SEQ ID NO: 1395 - RNA, 17 nt, Homo sapiens
acgugugccgccugcug

SEQ ID NO: 1396 - RNA, 17 nt, Homo sapiens
ugugccgccugcugggc

SEQ ID NO: 1397 - RNA, 17 nt, Homo sapiens
gugccgccugcugggca

SEQ ID NO: 1398 - RNA, 17 nt, Homo sapiens
ccgccugcugggcaucu

SEQ ID NO: 1399 - RNA, 17 nt, Homo sapiens
ugcugggcaucugccuc

SEQ ID NO: 1400 - RNA, 17 nt, Homo sapiens
ugggcaucugccucacc

SEQ ID NO: 1401 - RNA, 17 nt, Homo sapiens
gcaucugccucaccucc

SEQ ID NO: 1402 - RNA, 17 nt, Homo sapiens
caucugccucaccucca

SEQ ID NO: 1403 - RNA, 17 nt, Homo sapiens
ucugccucaccuccacc

SEQ ID NO: 1404 - RNA, 17 nt, Homo sapiens
ugccucaccuccaccgu

SEQ ID NO: 1405 - RNA, 17 nt, Homo sapiens
gccucaccuccaccgug

SEQ ID NO: 1406 - RNA, 17 nt, Homo sapiens
cucaccuccaccgugca

SEQ ID NO: 1407 - RNA, 17 nt, Homo sapiens
ucaccuccaccgugcaa

SEQ ID NO: 1408 - RNA, 17 nt, Homo sapiens
accuccaccgugcaacu

SEQ ID NO: 1409 - RNA, 17 nt, Homo sapiens
caccgugcaacucauca

SEQ ID NO: 1410 - RNA, 17 nt, Homo sapiens
cgugcaacucaucacgc

SEQ ID NO: 1411 - RNA, 17 nt, Homo sapiens
ugcaacucaucacgcag

SEQ ID NO: 1412 - RNA, 17 nt, Homo sapiens
aacucaucacgcagcuc

SEQ ID NO: 1413 - RNA, 17 nt, Homo sapiens
caucacgcagcucaugc

SEQ ID NO: 1414 - RNA, 17 nt, Homo sapiens
cacgcagcucaugcccu

SEQ ID NO: 1415 - RNA, 17 nt, Homo sapiens
cgcagcucaugcccuuc

SEQ ID NO: 1416 - RNA, 17 nt, Homo sapiens
gcucaugcccuucggcu

SEQ ID NO: 1417 - RNA, 17 nt, Homo sapiens
cucaugcccuucggcug

SEQ ID NO: 1418 - RNA, 17 nt, Homo sapiens
ucaugcccuucggcugc

SEQ ID NO: 1419 - RNA, 17 nt, Homo sapiens
ccuucggcugccuccug

SEQ ID NO: 1420 - RNA, 17 nt, Homo sapiens
ucggcugccuccuggac

SEQ ID NO: 1421 - RNA, 17 nt, Homo sapiens
cggcugccuccuggacu

SEQ ID NO: 1422 - RNA, 17 nt, Homo sapiens
gcugccuccuggacuau

SEQ ID NO: 1423 - RNA, 17 nt, Homo sapiens
cugccuccuggacuaug

SEQ ID NO: 1424 - RNA, 17 nt, Homo sapiens
uccuggacuauguccgg

SEQ ID NO: 1425 - RNA, 17 nt, Homo sapiens
acuauguccgggaacac

SEQ ID NO: 1426 - RNA, 17 nt, Homo sapiens
ccgggaacacaaagaca

SEQ ID NO: 1427 - RNA, 17 nt, Homo sapiens
gggaacacaaagacaau

SEQ ID NO: 1428 - RNA, 17 nt, Homo sapiens
acaaagacaauauuggc

SEQ ID NO: 1429 - RNA, 17 nt, Homo sapiens
auauuggcucccaguac

SEQ ID NO: 1430 - RNA, 17 nt, Homo sapiens
auuggcucccaguaccu

SEQ ID NO: 1431 - RNA, 17 nt, Homo sapiens
uuggcucccaguaccug

SEQ ID NO: 1432 - RNA, 17 nt, Homo sapiens
uggcucccaguaccugc

SEQ ID NO: 1433 - RNA, 17 nt, Homo sapiens
cccaguaccugcucaac

SEQ ID NO: 1434 - RNA, 17 nt, Homo sapiens
ccaguaccugcucaacu

SEQ ID NO: 1435 - RNA, 17 nt, Homo sapiens
guaccugcucaacuggu

SEQ ID NO: 1436 - RNA, 17 nt, Homo sapiens
accugcucaacuggugu

SEQ ID NO: 1437 - RNA, 17 nt, Homo sapiens
ugcucaacuggugugug

SEQ ID NO: 1438 - RNA, 17 nt, Homo sapiens
gugugugcagaucgcaa

SEQ ID NO: 1439 - RNA, 17 nt, Homo sapiens
cagaucgcaaagggcau

SEQ ID NO: 1440 - RNA, 17 nt, Homo sapiens
caaagggcaugaacuac

SEQ ID NO: 1441 - RNA, 17 nt, Homo sapiens
gcaugaacuacuuggag

SEQ ID NO: 1442 - RNA, 17 nt, Homo sapiens
ugaacuacuuggaggac

SEQ ID NO: 1443 - RNA, 17 nt, Homo sapiens
uggaggaccgucgcuug

SEQ ID NO: 1444 - RNA, 17 nt, Homo sapiens
accgucgcuuggugcac

SEQ ID NO: 1445 - RNA, 17 nt, Homo sapiens
cuuggugcaccgcgacc

SEQ ID NO: 1446 - RNA, 17 nt, Homo sapiens
uggugcaccgcgaccug

SEQ ID NO: 1447 - RNA, 17 nt, Homo sapiens
accgcgaccuggcagcc

SEQ ID NO: 1448 - RNA, 17 nt, Homo sapiens
ccgcgaccuggcagcca

SEQ ID NO: 1449 - RNA, 17 nt, Homo sapiens
gaccuggcagccaggaa

SEQ ID NO: 1450 - RNA, 17 nt, Homo sapiens
cuggcagccaggaacgu

SEQ ID NO: 1451 - RNA, 17 nt, Homo sapiens
uggcagccaggaacgua

SEQ ID NO: 1452 - RNA, 17 nt, Homo sapiens
gaacguacuggugaaaa

SEQ ID NO: 1453 - RNA, 17 nt, Homo sapiens
gugaaaacaccgcagca

SEQ ID NO: 1454 - RNA, 17 nt, Homo sapiens
gaaaacaccgcagcaug

SEQ ID NO: 1455 - RNA, 17 nt, Homo sapiens
aacaccgcagcauguca

SEQ ID NO: 1456 - RNA, 17 nt, Homo sapiens
accgcagcaugucaaga

SEQ ID NO: 1457 - RNA, 17 nt, Homo sapiens
agcaugucaagaucaca

SEQ ID NO: 1458 - RNA, 17 nt, Homo sapiens
ucaagaucacagauuuu

SEQ ID NO: 1459 - RNA, 17 nt, Homo sapiens
aagaucacagauuuugg

SEQ ID NO: 1460 - RNA, 17 nt, Homo sapiens
uuuugggcuggccaaac

SEQ ID NO: 1461 - RNA, 17 nt, Homo sapiens
gggcuggccaaacugcu

SEQ ID NO: 1462 - RNA, 17 nt, Homo sapiens
ggcuggccaaacugcug

SEQ ID NO: 1463 - RNA, 17 nt, Homo sapiens
ggccaaacugcugggug

SEQ ID NO: 1464 - RNA, 17 nt, Homo sapiens
caaacugcugggugcgg

SEQ ID NO: 1465 - RNA, 17 nt, Homo sapiens
aagaauaccaugcagaa

SEQ ID NO: 1466 - RNA, 17 nt, Homo sapiens
agaauaccaugcagaag

SEQ ID NO: 1467 - RNA, 17 nt, Homo sapiens
uaccaugcagaaggagg

SEQ ID NO: 1468 - RNA, 17 nt, Homo sapiens
aaggaggcaaagugccu

SEQ ID NO: 1469 - RNA, 17 nt, Homo sapiens
caaagugccuaucaagu

SEQ ID NO: 1470 - RNA, 17 nt, Homo sapiens
aaagugccuaucaagug

SEQ ID NO: 1471 - RNA, 17 nt, Homo sapiens
ugccuaucaaguggaug

SEQ ID NO: 1472 - RNA, 17 nt, Homo sapiens
uggauggcauuggaauc

SEQ ID NO: 1473 - RNA, 17 nt, Homo sapiens
uuggaaucaauuuuaca

SEQ ID NO: 1474 - RNA, 17 nt, Homo sapiens
aauuuuacacagaaucu

SEQ ID NO: 1475 - RNA, 17 nt, Homo sapiens
uuuuacacagaaucuau

SEQ ID NO: 1476 - RNA, 17 nt, Homo sapiens
acagaaucuauacccac

SEQ ID NO: 1477 - RNA, 17 nt, Homo sapiens
aucuauacccaccagag

SEQ ID NO: 1478 - RNA, 17 nt, Homo sapiens
ucuauacccaccagagu

SEQ ID NO: 1479 - RNA, 17 nt, Homo sapiens
cuauacccaccagagug

SEQ ID NO: 1480 - RNA, 17 nt, Homo sapiens
auacccaccagagugau

SEQ ID NO: 1481 - RNA, 17 nt, Homo sapiens
uacccaccagagugaug

SEQ ID NO: 1482 - RNA, 17 nt, Homo sapiens
gugaugucuggagcuac

SEQ ID NO: 1483 - RNA, 17 nt, Homo sapiens
ucuggagcuacggggug

SEQ ID NO: 1484 - RNA, 17 nt, Homo sapiens
ggggugaccguuuggga

SEQ ID NO: 1485 - RNA, 17 nt, Homo sapiens
uugaugaccuuuggauc

SEQ ID NO: 1486 - RNA, 17 nt, Homo sapiens
ugaugaccuuuggaucc

SEQ ID NO: 1487 - RNA, 17 nt, Homo sapiens
uuuggauccaagccaua

SEQ ID NO: 1488 - RNA, 17 nt, Homo sapiens
uuggauccaagccauau

SEQ ID NO: 1489 - RNA, 17 nt, Homo sapiens
auccaagccauaugacg

SEQ ID NO: 1490 - RNA, 17 nt, Homo sapiens
uccaagccauaugacgg

SEQ ID NO: 1491 - RNA, 17 nt, Homo sapiens
acggaaucccugccagc

SEQ ID NO: 1492 - RNA, 17 nt, Homo sapiens
cggaaucccugccagcg

SEQ ID NO: 1493 - RNA, 17 nt, Homo sapiens
ggaaucccugccagcga

SEQ ID NO: 1494 - RNA, 17 nt, Homo sapiens
aucccugccagcgagau

SEQ ID NO: 1495 - RNA, 17 nt, Homo sapiens
ucccugccagcgagauc

SEQ ID NO: 1496 - RNA, 17 nt, Homo sapiens
gcgagaucuccuccauc

SEQ ID NO: 1497 - RNA, 17 nt, Homo sapiens
gagaucuccuccauccu

SEQ ID NO: 1498 - RNA, 17 nt, Homo sapiens
agaucuccuccauccug

SEQ ID NO: 1499 - RNA, 17 nt, Homo sapiens
aucuccuccauccugga

SEQ ID NO: 1500 - RNA, 17 nt, Homo sapiens
ucuccuccauccuggag

SEQ ID NO: 1501 - RNA, 17 nt, Homo sapiens
ccuccauccuggagaaa

SEQ ID NO: 1502 - RNA, 17 nt, Homo sapiens
cuccauccuggagaaag

SEQ ID NO: 1503 - RNA, 17 nt, Homo sapiens
gagaacgccucccucag

SEQ ID NO: 1504 - RNA, 17 nt, Homo sapiens
agaacgccucccucagc

SEQ ID NO: 1505 - RNA, 17 nt, Homo sapiens
aacgccucccucagcca

SEQ ID NO: 1506 - RNA, 17 nt, Homo sapiens
acgccucccucagccac

SEQ ID NO: 1507 - RNA, 17 nt, Homo sapiens
cgccucccucagccacc

SEQ ID NO: 1508 - RNA, 17 nt, Homo sapiens
ccucccucagccaccca

SEQ ID NO: 1509 - RNA, 17 nt, Homo sapiens
cccucagccacccauau

SEQ ID NO: 1510 - RNA, 17 nt, Homo sapiens
ccucagccacccauaug

SEQ ID NO: 1511 - RNA, 17 nt, Homo sapiens
ucagccacccauaugua

SEQ ID NO: 1512 - RNA, 17 nt, Homo sapiens
cagccacccauauguac

SEQ ID NO: 1513 - RNA, 17 nt, Homo sapiens
agccacccauauguacc

SEQ ID NO: 1514 - RNA, 17 nt, Homo sapiens
auauguaccaucgaugu

SEQ ID NO: 1515 - RNA, 17 nt, Homo sapiens
uauguaccaucgauguc

SEQ ID NO: 1516 - RNA, 17 nt, Homo sapiens
ucgaugucuacaugauc

SEQ ID NO: 1517 - RNA, 17 nt, Homo sapiens
augucuacaugaucaug

SEQ ID NO: 1518 - RNA, 17 nt, Homo sapiens
acaugaucauggucaag

SEQ ID NO: 1519 - RNA, 17 nt, Homo sapiens
ucauggucaagugcugg

SEQ ID NO: 1520 - RNA, 17 nt, Homo sapiens
ucaagugcuggaugaua

SEQ ID NO: 1521 - RNA, 17 nt, Homo sapiens
auagacgcagauagucg

SEQ ID NO: 1522 - RNA, 17 nt, Homo sapiens
auagucgcccaaaguuc

SEQ ID NO: 1523 - RNA, 17 nt, Homo sapiens
uagucgcccaaaguucc

SEQ ID NO: 1524 - RNA, 17 nt, Homo sapiens
agucgcccaaaguuccg

SEQ ID NO: 1525 - RNA, 17 nt, Homo sapiens
caaaguuccgugaguug

SEQ ID NO: 1526 - RNA, 17 nt, Homo sapiens
aguugaucaucgaauuc

SEQ ID NO: 1527 - RNA, 17 nt, Homo sapiens
ucgaauucuccaaaaug

SEQ ID NO: 1528 - RNA, 17 nt, Homo sapiens
gaauucuccaaaauggc

SEQ ID NO: 1529 - RNA, 17 nt, Homo sapiens
aauucuccaaaauggcc

SEQ ID NO: 1530 - RNA, 17 nt, Homo sapiens
aaaauggcccgagaccc

SEQ ID NO: 1531 - RNA, 17 nt, Homo sapiens
aaauggcccgagacccc

SEQ ID NO: 1532 - RNA, 17 nt, Homo sapiens
cccgagacccccagcgc

SEQ ID NO: 1533 - RNA, 17 nt, Homo sapiens
ccgagacccccagcgcu

SEQ ID NO: 1534 - RNA, 17 nt, Homo sapiens
cgagacccccagcgcua

SEQ ID NO: 1535 - RNA, 17 nt, Homo sapiens
gagacccccagcgcuac

SEQ ID NO: 1536 - RNA, 17 nt, Homo sapiens
agacccccagcgcuacc

SEQ ID NO: 1537 - RNA, 17 nt, Homo sapiens
cccagcgcuaccuuguc

SEQ ID NO: 1538 - RNA, 17 nt, Homo sapiens
agcgcuaccuugucauu

SEQ ID NO: 1539 - RNA, 17 nt, Homo sapiens
gcgcuaccuugucauuc

SEQ ID NO: 1540 - RNA, 17 nt, Homo sapiens
accuugucauucagggg

SEQ ID NO: 1541 - RNA, 17 nt, Homo sapiens
ugucauucagggggaug

SEQ ID NO: 1542 - RNA, 17 nt, Homo sapiens
aagaaugcauuugccaa

SEQ ID NO: 1543 - RNA, 17 nt, Homo sapiens
gcauuugccaaguccua

SEQ ID NO: 1544 - RNA, 17 nt, Homo sapiens
cauuugccaaguccuac

SEQ ID NO: 1545 - RNA, 17 nt, Homo sapiens
gccaaguccuacagacu

SEQ ID NO: 1546 - RNA, 17 nt, Homo sapiens
ccaaguccuacagacuc

SEQ ID NO: 1547 - RNA, 17 nt, Homo sapiens
aguccuacagacuccaa

SEQ ID NO: 1548 - RNA, 17 nt, Homo sapiens
cuacagacuccaacuuc

SEQ ID NO: 1549 - RNA, 17 nt, Homo sapiens
acagacuccaacuucua

SEQ ID NO: 1550 - RNA, 17 nt, Homo sapiens
cagacuccaacuucuac

SEQ ID NO: 1551 - RNA, 17 nt, Homo sapiens
acuccaacuucuaccgu

SEQ ID NO: 1552 - RNA, 17 nt, Homo sapiens
ccaacuucuaccgugcc

SEQ ID NO: 1553 - RNA, 17 nt, Homo sapiens
acuucuaccgugcccug

SEQ ID NO: 1554 - RNA, 17 nt, Homo sapiens
uaccgugcccugaugga

SEQ ID NO: 1555 - RNA, 17 nt, Homo sapiens
accgugcccugauggau

SEQ ID NO: 1556 - RNA, 17 nt, Homo sapiens
ccgugcccugauggaug

SEQ ID NO: 1557 - RNA, 17 nt, Homo sapiens
aagaagacauggacgac

SEQ ID NO: 1558 - RNA, 17 nt, Homo sapiens
guggaugccgacgagua

SEQ ID NO: 1559 - RNA, 17 nt, Homo sapiens
acgaguaccucauccca

SEQ ID NO: 1560 - RNA, 17 nt, Homo sapiens
cgaguaccucaucccac

SEQ ID NO: 1561 - RNA, 17 nt, Homo sapiens
aguaccucaucccacag

SEQ ID NO: 1562 - RNA, 17 nt, Homo sapiens
accucaucccacagcag

SEQ ID NO: 1563 - RNA, 17 nt, Homo sapiens
ccucaucccacagcagg

SEQ ID NO: 1564 - RNA, 17 nt, Homo sapiens
cucaucccacagcaggg

SEQ ID NO: 1565 - RNA, 17 nt, Homo sapiens
caucccacagcagggcu

SEQ ID NO: 1566 - RNA, 17 nt, Homo sapiens
cccacagcagggcuucu

SEQ ID NO: 1567 - RNA, 17 nt, Homo sapiens
agcagggcuucuucagc

SEQ ID NO: 1568 - RNA, 17 nt, Homo sapiens
agggcuucuucagcagc

SEQ ID NO: 1569 - RNA, 17 nt, Homo sapiens
gcuucuucagcagcccc

SEQ ID NO: 1570 - RNA, 17 nt, Homo sapiens
ucuucagcagccccucc

SEQ ID NO: 1571 - RNA, 17 nt, Homo sapiens
ucagcagccccuccacg

SEQ ID NO: 1572 - RNA, 17 nt, Homo sapiens
cagcagccccuccacgu

SEQ ID NO: 1573 - RNA, 17 nt, Homo sapiens
agcagccccuccacguc

SEQ ID NO: 1574 - RNA, 17 nt, Homo sapiens
gcagccccuccacguca

SEQ ID NO: 1575 - RNA, 17 nt, Homo sapiens
agccccuccacgucacg

SEQ ID NO: 1576 - RNA, 17 nt, Homo sapiens
gccccuccacgucacgg

SEQ ID NO: 1577 - RNA, 17 nt, Homo sapiens
uccacgucacggacucc

SEQ ID NO: 1578 - RNA, 17 nt, Homo sapiens
ucacggacuccccuccu

SEQ ID NO: 1579 - RNA, 17 nt, Homo sapiens
acggacuccccuccuga

SEQ ID NO: 1580 - RNA, 17 nt, Homo sapiens
cggacuccccuccugag

SEQ ID NO: 1581 - RNA, 17 nt, Homo sapiens
ggacuccccuccugagc

SEQ ID NO: 1582 - RNA, 17 nt, Homo sapiens
gacuccccuccugagcu

SEQ ID NO: 1583 - RNA, 17 nt, Homo sapiens
cuccccuccugagcucu

SEQ ID NO: 1584 - RNA, 17 nt, Homo sapiens
uccccuccugagcucuc

SEQ ID NO: 1585 - RNA, 17 nt, Homo sapiens
uccugagcucucugagu

SEQ ID NO: 1586 - RNA, 17 nt, Homo sapiens
cugagcucucugagugc

SEQ ID NO: 1587 - RNA, 17 nt, Homo sapiens
gagcucucugagugcaa

SEQ ID NO: 1588 - RNA, 17 nt, Homo sapiens
cugagugcaaccagcaa

SEQ ID NO: 1589 - RNA, 17 nt, Homo sapiens
agugcaaccagcaacaa

SEQ ID NO: 1590 - RNA, 17 nt, Homo sapiens
gugcaaccagcaacaau

SEQ ID NO: 1591 - RNA, 17 nt, Homo sapiens
caaccagcaacaauucc

SEQ ID NO: 1592 - RNA, 17 nt, Homo sapiens
ccagcaacaauuccacc

SEQ ID NO: 1593 - RNA, 17 nt, Homo sapiens
aacaauuccaccguggc

SEQ ID NO: 1594 - RNA, 17 nt, Homo sapiens
acaauuccaccguggcu

SEQ ID NO: 1595 - RNA, 17 nt, Homo sapiens
aauuccaccguggcuug

SEQ ID NO: 1596 - RNA, 17 nt, Homo sapiens
accguggcuugcauuga

SEQ ID NO: 1597 - RNA, 17 nt, Homo sapiens
uggcuugcauugauaga

SEQ ID NO: 1598 - RNA, 17 nt, Homo sapiens
aaaugggcugcaaagcu

SEQ ID NO: 1599 - RNA, 17 nt, Homo sapiens
ugggcugcaaagcuguc

SEQ ID NO: 1600 - RNA, 17 nt, Homo sapiens
ugcaaagcugucccauc

SEQ ID NO: 1601 - RNA, 17 nt, Homo sapiens
aagcugucccaucaagg

SEQ ID NO: 1602 - RNA, 17 nt, Homo sapiens
agcugucccaucaagga

SEQ ID NO: 1603 - RNA, 17 nt, Homo sapiens
gcugucccaucaaggaa

SEQ ID NO: 1604 - RNA, 17 nt, Homo sapiens
gucccaucaaggaagac

SEQ ID NO: 1605 - RNA, 17 nt, Homo sapiens
aggaagacagcuucuug

SEQ ID NO: 1606 - RNA, 17 nt, Homo sapiens
aagacagcuucuugcag

SEQ ID NO: 1607 - RNA, 17 nt, Homo sapiens
acagcuucuugcagcga

SEQ ID NO: 1608 - RNA, 17 nt, Homo sapiens
cuucuugcagcgauaca

SEQ ID NO: 1609 - RNA, 17 nt, Homo sapiens
agcgauacagcucagac

SEQ ID NO: 1610 - RNA, 17 nt, Homo sapiens
gauacagcucagacccc

SEQ ID NO: 1611 - RNA, 17 nt, Homo sapiens
uacagcucagaccccac

SEQ ID NO: 1612 - RNA, 17 nt, Homo sapiens
gcucagaccccacaggc

SEQ ID NO: 1613 - RNA, 17 nt, Homo sapiens
cucagaccccacaggcg

SEQ ID NO: 1614 - RNA, 17 nt, Homo sapiens
ucagaccccacaggcgc

SEQ ID NO: 1615 - RNA, 17 nt, Homo sapiens
cagaccccacaggcgcc

SEQ ID NO: 1616 - RNA, 17 nt, Homo sapiens
gaccccacaggcgccuu

SEQ ID NO: 1617 - RNA, 17 nt, Homo sapiens
acaggcgccuugacuga

SEQ ID NO: 1618 - RNA, 17 nt, Homo sapiens
caggcgccuugacugag

SEQ ID NO: 1619 - RNA, 17 nt, Homo sapiens
gccuugacugaggacag

SEQ ID NO: 1620 - RNA, 17 nt, Homo sapiens
cugaggacagcauagac

SEQ ID NO: 1621 - RNA, 17 nt, Homo sapiens
aggacagcauagacgac

SEQ ID NO: 1622 - RNA, 17 nt, Homo sapiens
uagacgacaccuuccuc

SEQ ID NO: 1623 - RNA, 17 nt, Homo sapiens
gacgacaccuuccuccc

SEQ ID NO: 1624 - RNA, 17 nt, Homo sapiens
acgacaccuuccuccca

SEQ ID NO: 1625 - RNA, 17 nt, Homo sapiens
acaccuuccucccagug

SEQ ID NO: 1626 - RNA, 17 nt, Homo sapiens
caccuuccucccagugc

SEQ ID NO: 1627 - RNA, 17 nt, Homo sapiens
ccuuccucccagugccu

SEQ ID NO: 1628 - RNA, 17 nt, Homo sapiens
cuuccucccagugccug

SEQ ID NO: 1629 - RNA, 17 nt, Homo sapiens
uuccucccagugccuga

SEQ ID NO: 1630 - RNA, 17 nt, Homo sapiens
cccagugccugaauaca

SEQ ID NO: 1631 - RNA, 17 nt, Homo sapiens
ccagugccugaauacau

SEQ ID NO: 1632 - RNA, 17 nt, Homo sapiens
cugaauacauaaaccag

SEQ ID NO: 1633 - RNA, 17 nt, Homo sapiens
acauaaaccaguccguu

SEQ ID NO: 1634 - RNA, 17 nt, Homo sapiens
cauaaaccaguccguuc

SEQ ID NO: 1635 - RNA, 17 nt, Homo sapiens
aaccaguccguucccaa

SEQ ID NO: 1636 - RNA, 17 nt, Homo sapiens
guccguucccaaaaggc

SEQ ID NO: 1637 - RNA, 17 nt, Homo sapiens
uccguucccaaaaggcc

SEQ ID NO: 1638 - RNA, 17 nt, Homo sapiens
ccguucccaaaaggccc

SEQ ID NO: 1639 - RNA, 17 nt, Homo sapiens
caaaaggcccgcuggcu

SEQ ID NO: 1640 - RNA, 17 nt, Homo sapiens
aaaaggcccgcuggcuc

SEQ ID NO: 1641 - RNA, 17 nt, Homo sapiens
aggcccgcuggcucugu

SEQ ID NO: 1642 - RNA, 17 nt, Homo sapiens
ccgcuggcucugugcag

SEQ ID NO: 1643 - RNA, 17 nt, Homo sapiens
gcuggcucugugcagaa

SEQ ID NO: 1644 - RNA, 17 nt, Homo sapiens
cucugugcagaauccug

SEQ ID NO: 1645 - RNA, 17 nt, Homo sapiens
gcagaauccugucuauc

SEQ ID NO: 1646 - RNA, 17 nt, Homo sapiens
cagaauccugucuauca

SEQ ID NO: 1647 - RNA, 17 nt, Homo sapiens
auccugucuaucacaau

SEQ ID NO: 1648 - RNA, 17 nt, Homo sapiens
ugucuaucacaaucagc

SEQ ID NO: 1649 - RNA, 17 nt, Homo sapiens
ucuaucacaaucagccu

SEQ ID NO: 1650 - RNA, 17 nt, Homo sapiens
ucacaaucagccucuga

SEQ ID NO: 1651 - RNA, 17 nt, Homo sapiens
caaucagccucugaacc

SEQ ID NO: 1652 - RNA, 17 nt, Homo sapiens
aaucagccucugaaccc

SEQ ID NO: 1653 - RNA, 17 nt, Homo sapiens
ucagccucugaaccccg

SEQ ID NO: 1654 - RNA, 17 nt, Homo sapiens
cucugaaccccgcgccc

SEQ ID NO: 1655 - RNA, 17 nt, Homo sapiens
ucugaaccccgcgccca

SEQ ID NO: 1656 - RNA, 17 nt, Homo sapiens
cugaaccccgcgcccag

SEQ ID NO: 1657 - RNA, 17 nt, Homo sapiens
ccccgcgcccagcagag

SEQ ID NO: 1658 - RNA, 17 nt, Homo sapiens
cccgcgcccagcagaga

SEQ ID NO: 1659 - RNA, 17 nt, Homo sapiens
ccgcgcccagcagagac

SEQ ID NO: 1660 - RNA, 17 nt, Homo sapiens
cgcccagcagagaccca

SEQ ID NO: 1661 - RNA, 17 nt, Homo sapiens
gcagagacccacacuac

SEQ ID NO: 1662 - RNA, 17 nt, Homo sapiens
cagagacccacacuacc

SEQ ID NO: 1663 - RNA, 17 nt, Homo sapiens
agagacccacacuacca

SEQ ID NO: 1664 - RNA, 17 nt, Homo sapiens
agacccacacuaccagg

SEQ ID NO: 1665 - RNA, 17 nt, Homo sapiens
acccacacuaccaggac

SEQ ID NO: 1666 - RNA, 17 nt, Homo sapiens
cacacuaccaggacccc

SEQ ID NO: 1667 - RNA, 17 nt, Homo sapiens
acacuaccaggaccccc

SEQ ID NO: 1668 - RNA, 17 nt, Homo sapiens
accaggacccccacagc

SEQ ID NO: 1669 - RNA, 17 nt, Homo sapiens
ccaggacccccacagca

SEQ ID NO: 1670 - RNA, 17 nt, Homo sapiens
caggacccccacagcac

SEQ ID NO: 1671 - RNA, 17 nt, Homo sapiens
aggacccccacagcacu

SEQ ID NO: 1672 - RNA, 17 nt, Homo sapiens
ggacccccacagcacug

SEQ ID NO: 1673 - RNA, 17 nt, Homo sapiens
acccccacagcacugca

SEQ ID NO: 1674 - RNA, 17 nt, Homo sapiens
cccacagcacugcagug

SEQ ID NO: 1675 - RNA, 17 nt, Homo sapiens
cacagcacugcaguggg

SEQ ID NO: 1676 - RNA, 17 nt, Homo sapiens
agcacugcagugggcaa

SEQ ID NO: 1677 - RNA, 17 nt, Homo sapiens
cagugggcaaccccgag

SEQ ID NO: 1678 - RNA, 17 nt, Homo sapiens
ugggcaaccccgaguau

SEQ ID NO: 1679 - RNA, 17 nt, Homo sapiens
gggcaaccccgaguauc

SEQ ID NO: 1680 - RNA, 17 nt, Homo sapiens
ggcaaccccgaguaucu

SEQ ID NO: 1681 - RNA, 17 nt, Homo sapiens
cgaguaucucaacacug

SEQ ID NO: 1682 - RNA, 17 nt, Homo sapiens
aguaucucaacacuguc

SEQ ID NO: 1683 - RNA, 17 nt, Homo sapiens
aucucaacacuguccag

SEQ ID NO: 1684 - RNA, 17 nt, Homo sapiens
cucaacacuguccagcc

SEQ ID NO: 1685 - RNA, 17 nt, Homo sapiens
acacuguccagcccacc

SEQ ID NO: 1686 - RNA, 17 nt, Homo sapiens
cacuguccagcccaccu

SEQ ID NO: 1687 - RNA, 17 nt, Homo sapiens
uguccagcccaccugug

SEQ ID NO: 1688 - RNA, 17 nt, Homo sapiens
guccagcccaccugugu

SEQ ID NO: 1689 - RNA, 17 nt, Homo sapiens
uccagcccaccuguguc

SEQ ID NO: 1690 - RNA, 17 nt, Homo sapiens
cagcccaccugugucaa

SEQ ID NO: 1691 - RNA, 17 nt, Homo sapiens
agcccaccugugucaac

SEQ ID NO: 1692 - RNA, 17 nt, Homo sapiens
ccugugucaacagcaca

SEQ ID NO: 1693 - RNA, 17 nt, Homo sapiens
gugucaacagcacauuc

SEQ ID NO: 1694 - RNA, 17 nt, Homo sapiens
ucaacagcacauucgac

SEQ ID NO: 1695 - RNA, 17 nt, Homo sapiens
aacagcacauucgacag

SEQ ID NO: 1696 - RNA, 17 nt, Homo sapiens
cauucgacagcccugcc

SEQ ID NO: 1697 - RNA, 17 nt, Homo sapiens
ucgacagcccugcccac

SEQ ID NO: 1698 - RNA, 17 nt, Homo sapiens
cgacagcccugcccacu

SEQ ID NO: 1699 - RNA, 17 nt, Homo sapiens
gacagcccugcccacug

SEQ ID NO: 1700 - RNA, 17 nt, Homo sapiens
agcccugcccacugggc

SEQ ID NO: 1701 - RNA, 17 nt, Homo sapiens
gcccugcccacugggcc

SEQ ID NO: 1702 - RNA, 17 nt, Homo sapiens
cccugcccacugggccc

SEQ ID NO: 1703 - RNA, 17 nt, Homo sapiens
cugcccacugggcccag

SEQ ID NO: 1704 - RNA, 17 nt, Homo sapiens
cacugggcccagaaagg

SEQ ID NO: 1705 - RNA, 17 nt, Homo sapiens
acugggcccagaaaggc

SEQ ID NO: 1706 - RNA, 17 nt, Homo sapiens
cugggcccagaaaggca

SEQ ID NO: 1707 - RNA, 17 nt, Homo sapiens
agaaaggcagccaccaa

SEQ ID NO: 1708 - RNA, 17 nt, Homo sapiens
aaggcagccaccaaauu

SEQ ID NO: 1709 - RNA, 17 nt, Homo sapiens
aggcagccaccaaauua

SEQ ID NO: 1710 - RNA, 17 nt, Homo sapiens
gcagccaccaaauuagc

SEQ ID NO: 1711 - RNA, 17 nt, Homo sapiens
cagccaccaaauuagcc

SEQ ID NO: 1712 - RNA, 17 nt, Homo sapiens
aaauuagccuggacaac

SEQ ID NO: 1713 - RNA, 17 nt, Homo sapiens
aauuagccuggacaacc

SEQ ID NO: 1714 - RNA, 17 nt, Homo sapiens
gccuggacaacccugac

SEQ ID NO: 1715 - RNA, 17 nt, Homo sapiens
uggacaacccugacuac

SEQ ID NO: 1716 - RNA, 17 nt, Homo sapiens
ggacaacccugacuacc

SEQ ID NO: 1717 - RNA, 17 nt, Homo sapiens
gacaacccugacuacca

SEQ ID NO: 1718 - RNA, 17 nt, Homo sapiens
acccugacuaccagcag

SEQ ID NO: 1719 - RNA, 17 nt, Homo sapiens
cugacuaccagcaggac

SEQ ID NO: 1720 - RNA, 17 nt, Homo sapiens
ugacuaccagcaggacu

SEQ ID NO: 1721 - RNA, 17 nt, Homo sapiens
cuaccagcaggacuucu

SEQ ID NO: 1722 - RNA, 17 nt, Homo sapiens
agcaggacuucuuuccc

SEQ ID NO: 1723 - RNA, 17 nt, Homo sapiens
aggacuucuuucccaag

SEQ ID NO: 1724 - RNA, 17 nt, Homo sapiens
cuucuuucccaaggaag

SEQ ID NO: 1725 - RNA, 17 nt, Homo sapiens
uucuuucccaaggaagc

SEQ ID NO: 1726 - RNA, 17 nt, Homo sapiens
ucuuucccaaggaagcc

SEQ ID NO: 1727 - RNA, 17 nt, Homo sapiens
aaggaagccaagccaaa

SEQ ID NO: 1728 - RNA, 17 nt, Homo sapiens
aggaagccaagccaaau

SEQ ID NO: 1729 - RNA, 17 nt, Homo sapiens
agccaagccaaauggca

SEQ ID NO: 1730 - RNA, 17 nt, Homo sapiens
gccaagccaaauggcau

SEQ ID NO: 1731 - RNA, 17 nt, Homo sapiens
caaauggcaucuuuaag

SEQ ID NO: 1732 - RNA, 17 nt, Homo sapiens
auggcaucuuuaagggc

SEQ ID NO: 1733 - RNA, 17 nt, Homo sapiens
uuaagggcuccacagcu

SEQ ID NO: 1734 - RNA, 17 nt, Homo sapiens
aagggcuccacagcuga

SEQ ID NO: 1735 - RNA, 17 nt, Homo sapiens
agggcuccacagcugaa

SEQ ID NO: 1736 - RNA, 17 nt, Homo sapiens
ggcuccacagcugaaaa

SEQ ID NO: 1737 - RNA, 17 nt, Homo sapiens
uccacagcugaaaaugc

SEQ ID NO: 1738 - RNA, 17 nt, Homo sapiens
gaaaaugcagaauaccu

SEQ ID NO: 1739 - RNA, 17 nt, Homo sapiens
cagaauaccuaaggguc

SEQ ID NO: 1740 - RNA, 17 nt, Homo sapiens
agaauaccuaagggucg

SEQ ID NO: 1741 - RNA, 17 nt, Homo sapiens
ggucgcgccacaaagca

SEQ ID NO: 1742 - RNA, 17 nt, Homo sapiens
gucgcgccacaaagcag

SEQ ID NO: 1743 - RNA, 17 nt, Homo sapiens
cgcgccacaaagcagug

SEQ ID NO: 1744 - RNA, 17 nt, Homo sapiens
cacaaagcagugaauuu

SEQ ID NO: 1745 - RNA, 17 nt, Homo sapiens
auuggagcaugaccacg

SEQ ID NO: 1746 - RNA, 17 nt, Homo sapiens
agcaugaccacggagga

SEQ ID NO: 1747 - RNA, 17 nt, Homo sapiens
gcaugaccacggaggau

SEQ ID NO: 1748 - RNA, 17 nt, Homo sapiens
guaugagcccuaaaaau

SEQ ID NO: 1749 - RNA, 17 nt, Homo sapiens
uaugagcccuaaaaauc

SEQ ID NO: 1750 - RNA, 17 nt, Homo sapiens
augagcccuaaaaaucc

SEQ ID NO: 1751 - RNA, 17 nt, Homo sapiens
uaaaaauccagacucuu

SEQ ID NO: 1752 - RNA, 17 nt, Homo sapiens
aaaaauccagacucuuu

SEQ ID NO: 1753 - RNA, 17 nt, Homo sapiens
auccagacucuuucgau

SEQ ID NO: 1754 - RNA, 17 nt, Homo sapiens
ccagacucuuucgauac

SEQ ID NO: 1755 - RNA, 17 nt, Homo sapiens
uucgauacccaggacca

SEQ ID NO: 1756 - RNA, 17 nt, Homo sapiens
ucgauacccaggaccaa

SEQ ID NO: 1757 - RNA, 17 nt, Homo sapiens
cgauacccaggaccaag

SEQ ID NO: 1758 - RNA, 17 nt, Homo sapiens
cccaggaccaagccaca

SEQ ID NO: 1759 - RNA, 17 nt, Homo sapiens
ccaggaccaagccacag

SEQ ID NO: 1760 - RNA, 17 nt, Homo sapiens
gaccaagccacagcagg

SEQ ID NO: 1761 - RNA, 17 nt, Homo sapiens
accaagccacagcaggu

SEQ ID NO: 1762 - RNA, 17 nt, Homo sapiens
caagccacagcaggucc

SEQ ID NO: 1763 - RNA, 17 nt, Homo sapiens
gccacagcagguccucc

SEQ ID NO: 1764 - RNA, 17 nt, Homo sapiens
agcagguccuccauccc

SEQ ID NO: 1765 - RNA, 17 nt, Homo sapiens
gcagguccuccauccca

SEQ ID NO: 1766 - RNA, 17 nt, Homo sapiens
agguccuccaucccaac

SEQ ID NO: 1767 - RNA, 17 nt, Homo sapiens
gguccuccaucccaaca

SEQ ID NO: 1768 - RNA, 17 nt, Homo sapiens
ccuccaucccaacagcc

SEQ ID NO: 1769 - RNA, 17 nt, Homo sapiens
cuccaucccaacagcca

SEQ ID NO: 1770 - RNA, 17 nt, Homo sapiens
uccaucccaacagccau

SEQ ID NO: 1771 - RNA, 17 nt, Homo sapiens
aucccaacagccaugcc

SEQ ID NO: 1772 - RNA, 17 nt, Homo sapiens
ccaacagccaugcccgc

SEQ ID NO: 1773 - RNA, 17 nt, Homo sapiens
caacagccaugcccgca

SEQ ID NO: 1774 - RNA, 17 nt, Homo sapiens
agccaugcccgcauuag

SEQ ID NO: 1775 - RNA, 17 nt, Homo sapiens
gccaugcccgcauuagc

SEQ ID NO: 1776 - RNA, 17 nt, Homo sapiens
augcccgcauuagcucu

SEQ ID NO: 1777 - RNA, 17 nt, Homo sapiens
gcauuagcucuuagacc

SEQ ID NO: 1778 - RNA, 17 nt, Homo sapiens
auuagcucuuagaccca

SEQ ID NO: 1779 - RNA, 17 nt, Homo sapiens
ucuuagacccacagacu

SEQ ID NO: 1780 - RNA, 17 nt, Homo sapiens
cuuagacccacagacug

SEQ ID NO: 1781 - RNA, 17 nt, Homo sapiens
uuagacccacagacugg

SEQ ID NO: 1782 - RNA, 17 nt, Homo sapiens
agacccacagacugguu

SEQ ID NO: 1783 - RNA, 17 nt, Homo sapiens
ccacagacugguuuugc

SEQ ID NO: 1784 - RNA, 17 nt, Homo sapiens
gguuuugcaacguuuac

SEQ ID NO: 1785 - RNA, 17 nt, Homo sapiens
acguuuacaccgacuag

SEQ ID NO: 1786 - RNA, 17 nt, Homo sapiens
guuuacaccgacuagcc

SEQ ID NO: 1787 - RNA, 17 nt, Homo sapiens
acaccgacuagccagga

SEQ ID NO: 1788 - RNA, 17 nt, Homo sapiens
cgacuagccaggaagua

SEQ ID NO: 1789 - RNA, 17 nt, Homo sapiens
gacuagccaggaaguac

SEQ ID NO: 1790 - RNA, 17 nt, Homo sapiens
ggaaguacuuccaccuc

SEQ ID NO: 1791 - RNA, 17 nt, Homo sapiens
aguacuuccaccucggg

SEQ ID NO: 1792 - RNA, 17 nt, Homo sapiens
guacuuccaccucgggc

SEQ ID NO: 1793 - RNA, 17 nt, Homo sapiens
acuuccaccucgggcac

SEQ ID NO: 1794 - RNA, 17 nt, Homo sapiens
cuuccaccucgggcaca

SEQ ID NO: 1795 - RNA, 17 nt, Homo sapiens
ccucgggcacauuuugg

SEQ ID NO: 1796 - RNA, 17 nt, Homo sapiens
ucgggcacauuuuggga

SEQ ID NO: 1797 - RNA, 17 nt, Homo sapiens
gaaguugcauuccuuug

SEQ ID NO: 1798 - RNA, 17 nt, Homo sapiens
uugcauuccuuugucuu

SEQ ID NO: 1799 - RNA, 17 nt, Homo sapiens
ugcauuccuuugucuuc

SEQ ID NO: 1800 - RNA, 17 nt, Homo sapiens
ccuuugucuucaaacug

SEQ ID NO: 1801 - RNA, 17 nt, Homo sapiens
uugucuucaaacuguga

SEQ ID NO: 1802 - RNA, 17 nt, Homo sapiens
cuucaaacugugaagca

SEQ ID NO: 1803 - RNA, 17 nt, Homo sapiens
ugugaagcauuuacaga

SEQ ID NO: 1804 - RNA, 17 nt, Homo sapiens
gcauuuacagaaacgca

SEQ ID NO: 1805 - RNA, 17 nt, Homo sapiens
agaaacgcauccagcaa

SEQ ID NO: 1806 - RNA, 17 nt, Homo sapiens
aacgcauccagcaagaa

SEQ ID NO: 1807 - RNA, 17 nt, Homo sapiens
acgcauccagcaagaau

SEQ ID NO: 1808 - RNA, 17 nt, Homo sapiens
cauccagcaagaauauu

SEQ ID NO: 1809 - RNA, 17 nt, Homo sapiens
auauugucccuuugagc

SEQ ID NO: 1810 - RNA, 17 nt, Homo sapiens
uauugucccuuugagca

SEQ ID NO: 1811 - RNA, 17 nt, Homo sapiens
auugucccuuugagcag

SEQ ID NO: 1812 - RNA, 17 nt, Homo sapiens
cuuugagcagaaauuua

SEQ ID NO: 1813 - RNA, 17 nt, Homo sapiens
aauuuaucuuucaaaga

SEQ ID NO: 1814 - RNA, 17 nt, Homo sapiens
uaucuuucaaagaggua

SEQ ID NO: 1815 - RNA, 17 nt, Homo sapiens
uggggaucuuggaguuu

SEQ ID NO: 1816 - RNA, 17 nt, Homo sapiens
aguuuuucauugucgcu

SEQ ID NO: 1817 - RNA, 17 nt, Homo sapiens
auugucgcuauugauuu

SEQ ID NO: 1818 - RNA, 17 nt, Homo sapiens
auuuuuacuucaauggg

SEQ ID NO: 1819 - RNA, 17 nt, Homo sapiens
uuuacuucaaugggcuc

SEQ ID NO: 1820 - RNA, 17 nt, Homo sapiens
caaugggcucuuccaac

SEQ ID NO: 1821 - RNA, 17 nt, Homo sapiens
augggcucuuccaacaa

SEQ ID NO: 1822 - RNA, 17 nt, Homo sapiens
ggcucuuccaacaagga

SEQ ID NO: 1823 - RNA, 17 nt, Homo sapiens
gcucuuccaacaaggaa

SEQ ID NO: 1824 - RNA, 17 nt, Homo sapiens
cuuccaacaaggaagaa

SEQ ID NO: 1825 - RNA, 17 nt, Homo sapiens
gaagaagcuugcuggua

SEQ ID NO: 1826 - RNA, 17 nt, Homo sapiens
aagcuugcugguagcac

SEQ ID NO: 1827 - RNA, 17 nt, Homo sapiens
cugguagcacuugcuac

SEQ ID NO: 1828 - RNA, 17 nt, Homo sapiens
gguagcacuugcuaccc

SEQ ID NO: 1829 - RNA, 17 nt, Homo sapiens
gcacuugcuacccugag

SEQ ID NO: 1830 - RNA, 17 nt, Homo sapiens
cuugcuacccugaguuc

SEQ ID NO: 1831 - RNA, 17 nt, Homo sapiens
uugcuacccugaguuca

SEQ ID NO: 1832 - RNA, 17 nt, Homo sapiens
ugcuacccugaguucau

SEQ ID NO: 1833 - RNA, 17 nt, Homo sapiens
cugaguucauccaggcc

SEQ ID NO: 1834 - RNA, 17 nt, Homo sapiens
aguucauccaggcccaa

SEQ ID NO: 1835 - RNA, 17 nt, Homo sapiens
guucauccaggcccaac

SEQ ID NO: 1836 - RNA, 17 nt, Homo sapiens
auccaggcccaacugug

SEQ ID NO: 1837 - RNA, 17 nt, Homo sapiens
uccaggcccaacuguga

SEQ ID NO: 1838 - RNA, 17 nt, Homo sapiens
ccaggcccaacugugag

SEQ ID NO: 1839 - RNA, 17 nt, Homo sapiens
ggcccaacugugagcaa

SEQ ID NO: 1840 - RNA, 17 nt, Homo sapiens
cugugagcaaggagcac

SEQ ID NO: 1841 - RNA, 17 nt, Homo sapiens
caaggagcacaagccac

SEQ ID NO: 1842 - RNA, 17 nt, Homo sapiens
aggagcacaagccacaa

SEQ ID NO: 1843 - RNA, 17 nt, Homo sapiens
gcacaagccacaagucu

SEQ ID NO: 1844 - RNA, 17 nt, Homo sapiens
cacaagccacaagucuu

SEQ ID NO: 1845 - RNA, 17 nt, Homo sapiens
caagccacaagucuucc

SEQ ID NO: 1846 - RNA, 17 nt, Homo sapiens
cacaagucuuccagagg

SEQ ID NO: 1847 - RNA, 17 nt, Homo sapiens
aagucuuccagaggaug

SEQ ID NO: 1848 - RNA, 17 nt, Homo sapiens
agucuuccagaggaugc

SEQ ID NO: 1849 - RNA, 17 nt, Homo sapiens
gaggaugcuugauucca

SEQ ID NO: 1850 - RNA, 17 nt, Homo sapiens
cuugauuccagugguuc

SEQ ID NO: 1851 - RNA, 17 nt, Homo sapiens
uugauuccagugguucu

SEQ ID NO: 1852 - RNA, 17 nt, Homo sapiens
agugguucugcuucaag

SEQ ID NO: 1853 - RNA, 17 nt, Homo sapiens
gguucugcuucaaggcu

SEQ ID NO: 1854 - RNA, 17 nt, Homo sapiens
ucugcuucaaggcuucc

SEQ ID NO: 1855 - RNA, 17 nt, Homo sapiens
uucaaggcuuccacugc

SEQ ID NO: 1856 - RNA, 17 nt, Homo sapiens
aaggcuuccacugcaaa

SEQ ID NO: 1857 - RNA, 17 nt, Homo sapiens
aggcuuccacugcaaaa

SEQ ID NO: 1858 - RNA, 17 nt, Homo sapiens
gcuuccacugcaaaaca

SEQ ID NO: 1859 - RNA, 17 nt, Homo sapiens
uccacugcaaaacacua

SEQ ID NO: 1860 - RNA, 17 nt, Homo sapiens
ugcaaaacacuaaagau

SEQ ID NO: 1861 - RNA, 17 nt, Homo sapiens
caaaacacuaaagaucc

SEQ ID NO: 1862 - RNA, 17 nt, Homo sapiens
uaaagauccaagaaggc

SEQ ID NO: 1863 - RNA, 17 nt, Homo sapiens
aaagauccaagaaggcc

SEQ ID NO: 1864 - RNA, 17 nt, Homo sapiens
aagaaggccuucauggc

SEQ ID NO: 1865 - RNA, 17 nt, Homo sapiens
agaaggccuucauggcc

SEQ ID NO: 1866 - RNA, 17 nt, Homo sapiens
aggccuucauggcccca

SEQ ID NO: 1867 - RNA, 17 nt, Homo sapiens
uucauggccccagcagg

SEQ ID NO: 1868 - RNA, 17 nt, Homo sapiens
ucauggccccagcaggc

SEQ ID NO: 1869 - RNA, 17 nt, Homo sapiens
cauggccccagcaggcc

SEQ ID NO: 1870 - RNA, 17 nt, Homo sapiens
auggccccagcaggccg

SEQ ID NO: 1871 - RNA, 17 nt, Homo sapiens
gccccagcaggccggau

SEQ ID NO: 1872 - RNA, 17 nt, Homo sapiens
cagcaggccggaucggu

SEQ ID NO: 1873 - RNA, 17 nt, Homo sapiens
aucgguacuguaucaag

SEQ ID NO: 1874 - RNA, 17 nt, Homo sapiens
acuguaucaagucaugg

SEQ ID NO: 1875 - RNA, 17 nt, Homo sapiens
aucaagucauggcaggu

SEQ ID NO: 1876 - RNA, 17 nt, Homo sapiens
gucauggcagguacagu

SEQ ID NO: 1877 - RNA, 17 nt, Homo sapiens
gcagguacaguaggaua

SEQ ID NO: 1878 - RNA, 17 nt, Homo sapiens
ggauaagccacucuguc

SEQ ID NO: 1879 - RNA, 17 nt, Homo sapiens
gauaagccacucugucc

SEQ ID NO: 1880 - RNA, 17 nt, Homo sapiens
uaagccacucugucccu

SEQ ID NO: 1881 - RNA, 17 nt, Homo sapiens
agccacucugucccuuc

SEQ ID NO: 1882 - RNA, 17 nt, Homo sapiens
acucugucccuuccugg

SEQ ID NO: 1883 - RNA, 17 nt, Homo sapiens
cucugucccuuccuggg

SEQ ID NO: 1884 - RNA, 17 nt, Homo sapiens
ucugucccuuccugggc

SEQ ID NO: 1885 - RNA, 17 nt, Homo sapiens
gucccuuccugggcaaa

SEQ ID NO: 1886 - RNA, 17 nt, Homo sapiens
ucccuuccugggcaaag

SEQ ID NO: 1887 - RNA, 17 nt, Homo sapiens
uccugggcaaagaagaa

SEQ ID NO: 1888 - RNA, 17 nt, Homo sapiens
augaauucuuccuuaga

SEQ ID NO: 1889 - RNA, 17 nt, Homo sapiens
aauucuuccuuagacuu

SEQ ID NO: 1890 - RNA, 17 nt, Homo sapiens
auucuuccuuagacuua

SEQ ID NO: 1891 - RNA, 17 nt, Homo sapiens
ccuuagacuuacuuuug

SEQ ID NO: 1892 - RNA, 17 nt, Homo sapiens
agacuuacuuuuguaaa

SEQ ID NO: 1893 - RNA, 17 nt, Homo sapiens
aaaauguccccacggua

SEQ ID NO: 1894 - RNA, 17 nt, Homo sapiens
aaauguccccacgguac

SEQ ID NO: 1895 - RNA, 17 nt, Homo sapiens
aauguccccacgguacu

SEQ ID NO: 1896 - RNA, 17 nt, Homo sapiens
auguccccacgguacuu

SEQ ID NO: 1897 - RNA, 17 nt, Homo sapiens
cacgguacuuacucccc

SEQ ID NO: 1898 - RNA, 17 nt, Homo sapiens
guacuuacuccccacug

SEQ ID NO: 1899 - RNA, 17 nt, Homo sapiens
acuuacuccccacugau

SEQ ID NO: 1900 - RNA, 17 nt, Homo sapiens
cuuacuccccacugaug

SEQ ID NO: 1901 - RNA, 17 nt, Homo sapiens
uuacuccccacugaugg

SEQ ID NO: 1902 - RNA, 17 nt, Homo sapiens
uacuccccacugaugga

SEQ ID NO: 1903 - RNA, 17 nt, Homo sapiens
cuccccacugauggacc

SEQ ID NO: 1904 - RNA, 17 nt, Homo sapiens
ugauggaccagugguuu

SEQ ID NO: 1905 - RNA, 17 nt, Homo sapiens
gauggaccagugguuuc

SEQ ID NO: 1906 - RNA, 17 nt, Homo sapiens
gugguuuccagucauga

SEQ ID NO: 1907 - RNA, 17 nt, Homo sapiens
ugguuuccagucaugag

SEQ ID NO: 1908 - RNA, 17 nt, Homo sapiens
uuccagucaugagcguu

SEQ ID NO: 1909 - RNA, 17 nt, Homo sapiens
cguuagacugacuuguu

SEQ ID NO: 1910 - RNA, 17 nt, Homo sapiens
agacugacuuguuuguc

SEQ ID NO: 1911 - RNA, 17 nt, Homo sapiens
uguuugucuuccauucc

SEQ ID NO: 1912 - RNA, 17 nt, Homo sapiens
uugucuuccauuccauu

SEQ ID NO: 1913 - RNA, 17 nt, Homo sapiens
ugucuuccauuccauug

SEQ ID NO: 1914 - RNA, 17 nt, Homo sapiens
uuccauuccauuguuuu

SEQ ID NO: 1915 - RNA, 17 nt, Homo sapiens
uccauuccauuguuuug

SEQ ID NO: 1916 - RNA, 17 nt, Homo sapiens
uuugaaacucaguaugc

SEQ ID NO: 1917 - RNA, 17 nt, Homo sapiens
ugaaacucaguaugccg

SEQ ID NO: 1918 - RNA, 17 nt, Homo sapiens
caguaugccgccccugu

SEQ ID NO: 1919 - RNA, 17 nt, Homo sapiens
uaugccgccccugucuu

SEQ ID NO: 1920 - RNA, 17 nt, Homo sapiens
augccgccccugucuug

SEQ ID NO: 1921 - RNA, 17 nt, Homo sapiens
ugccgccccugucuugc

SEQ ID NO: 1922 - RNA, 17 nt, Homo sapiens
gccgccccugucuugcu

SEQ ID NO: 1923 - RNA, 17 nt, Homo sapiens
ccccugucuugcuguca

SEQ ID NO: 1924 - RNA, 17 nt, Homo sapiens
ugucuugcugucaugaa

SEQ ID NO: 1925 - RNA, 17 nt, Homo sapiens
uugcugucaugaaauca

SEQ ID NO: 1926 - RNA, 17 nt, Homo sapiens
augaaaucagcaagaga

SEQ ID NO: 1927 - RNA, 17 nt, Homo sapiens
aaaucagcaagagagga

SEQ ID NO: 1928 - RNA, 17 nt, Homo sapiens
aggaugacacaucaaau

SEQ ID NO: 1929 - RNA, 17 nt, Homo sapiens
gaugacacaucaaauaa

SEQ ID NO: 1930 - RNA, 17 nt, Homo sapiens
gacacaucaaauaauaa

SEQ ID NO: 1931 - RNA, 17 nt, Homo sapiens
auaauaacucggauucc

SEQ ID NO: 1932 - RNA, 17 nt, Homo sapiens
ucggauuccagcccaca

SEQ ID NO: 1933 - RNA, 17 nt, Homo sapiens
cggauuccagcccacau

SEQ ID NO: 1934 - RNA, 17 nt, Homo sapiens
auuccagcccacauugg

SEQ ID NO: 1935 - RNA, 17 nt, Homo sapiens
uuccagcccacauugga

SEQ ID NO: 1936 - RNA, 17 nt, Homo sapiens
uccagcccacauuggau

SEQ ID NO: 1937 - RNA, 17 nt, Homo sapiens
cagcccacauuggauuc

SEQ ID NO: 1938 - RNA, 17 nt, Homo sapiens
uuggauucaucagcauu

SEQ ID NO: 1939 - RNA, 17 nt, Homo sapiens
gauucaucagcauuugg

SEQ ID NO: 1940 - RNA, 17 nt, Homo sapiens
ucaucagcauuuggacc

SEQ ID NO: 1941 - RNA, 17 nt, Homo sapiens
auuuggaccaauagccc

SEQ ID NO: 1942 - RNA, 17 nt, Homo sapiens
uuuggaccaauagccca

SEQ ID NO: 1943 - RNA, 17 nt, Homo sapiens
ccaauagcccacagcug

SEQ ID NO: 1944 - RNA, 17 nt, Homo sapiens
caauagcccacagcuga

SEQ ID NO: 1945 - RNA, 17 nt, Homo sapiens
aauagcccacagcugag

SEQ ID NO: 1946 - RNA, 17 nt, Homo sapiens
uagcccacagcugagaa

SEQ ID NO: 1947 - RNA, 17 nt, Homo sapiens
cccacagcugagaaugu

SEQ ID NO: 1948 - RNA, 17 nt, Homo sapiens
uggaauaccuaaggaua

SEQ ID NO: 1949 - RNA, 17 nt, Homo sapiens
ggaauaccuaaggauaa

SEQ ID NO: 1950 - RNA, 17 nt, Homo sapiens
aggauaacaccgcuuuu

SEQ ID NO: 1951 - RNA, 17 nt, Homo sapiens
gauaacaccgcuuuugu

SEQ ID NO: 1952 - RNA, 17 nt, Homo sapiens
aacaccgcuuuuguucu

SEQ ID NO: 1953 - RNA, 17 nt, Homo sapiens
uuuuguucucgcaaaaa

SEQ ID NO: 1954 - RNA, 17 nt, Homo sapiens
guucucgcaaaaacgua

SEQ ID NO: 1955 - RNA, 17 nt, Homo sapiens
aacguaucuccuaauuu

SEQ ID NO: 1956 - RNA, 17 nt, Homo sapiens
cguaucuccuaauuuga

SEQ ID NO: 1957 - RNA, 17 nt, Homo sapiens
guaucuccuaauuugag

SEQ ID NO: 1958 - RNA, 17 nt, Homo sapiens
uuugaggcucagaugaa

SEQ ID NO: 1959 - RNA, 17 nt, Homo sapiens
ugaggcucagaugaaau

SEQ ID NO: 1960 - RNA, 17 nt, Homo sapiens
ugaaaugcaucaggucc

SEQ ID NO: 1961 - RNA, 17 nt, Homo sapiens
aaugcaucagguccuuu

SEQ ID NO: 1962 - RNA, 17 nt, Homo sapiens
aucagguccuuuggggc

SEQ ID NO: 1963 - RNA, 17 nt, Homo sapiens
ucagguccuuuggggca

SEQ ID NO: 1964 - RNA, 17 nt, Homo sapiens
uuuggggcauagaucag

SEQ ID NO: 1965 - RNA, 17 nt, Homo sapiens
cauagaucagaagacua

SEQ ID NO: 1966 - RNA, 17 nt, Homo sapiens
cagaagacuacaaaaau

SEQ ID NO: 1967 - RNA, 17 nt, Homo sapiens
aagacuacaaaaaugaa

SEQ ID NO: 1968 - RNA, 17 nt, Homo sapiens
aaugaagcugcucugaa

SEQ ID NO: 1969 - RNA, 17 nt, Homo sapiens
gaagcugcucugaaauc

SEQ ID NO: 1970 - RNA, 17 nt, Homo sapiens
agcugcucugaaaucuc

SEQ ID NO: 1971 - RNA, 17 nt, Homo sapiens
cugaaaucuccuuuagc

SEQ ID NO: 1972 - RNA, 17 nt, Homo sapiens
gaaaucuccuuuagcca

SEQ ID NO: 1973 - RNA, 17 nt, Homo sapiens
aaaucuccuuuagccau

SEQ ID NO: 1974 - RNA, 17 nt, Homo sapiens
ccuuuagccaucacccc

SEQ ID NO: 1975 - RNA, 17 nt, Homo sapiens
cuuuagccaucacccca

SEQ ID NO: 1976 - RNA, 17 nt, Homo sapiens
uagccaucaccccaacc

SEQ ID NO: 1977 - RNA, 17 nt, Homo sapiens
gccaucaccccaacccc

SEQ ID NO: 1978 - RNA, 17 nt, Homo sapiens
ccaucaccccaaccccc

SEQ ID NO: 1979 - RNA, 17 nt, Homo sapiens
caucaccccaacccccc

SEQ ID NO: 1980 - RNA, 17 nt, Homo sapiens
aucaccccaacccccca

SEQ ID NO: 1981 - RNA, 17 nt, Homo sapiens
accccaaccccccaaaa

SEQ ID NO: 1982 - RNA, 17 nt, Homo sapiens
ccccaaccccccaaaau

SEQ ID NO: 1983 - RNA, 17 nt, Homo sapiens
cccaaccccccaaaauu

SEQ ID NO: 1984 - RNA, 17 nt, Homo sapiens
ccaaccccccaaaauua

SEQ ID NO: 1985 - RNA, 17 nt, Homo sapiens
caaccccccaaaauuag

SEQ ID NO: 1986 - RNA, 17 nt, Homo sapiens
aaccccccaaaauuagu

SEQ ID NO: 1987 - RNA, 17 nt, Homo sapiens
uguguuacuuauggaag

SEQ ID NO: 1988 - RNA, 17 nt, Homo sapiens
uaguuuucuccuuuuac

SEQ ID NO: 1989 - RNA, 17 nt, Homo sapiens
guuuucuccuuuuacuu

SEQ ID NO: 1990 - RNA, 17 nt, Homo sapiens
uuuucuccuuuuacuuc

SEQ ID NO: 1991 - RNA, 17 nt, Homo sapiens
ccuuuuacuucacuuca

SEQ ID NO: 1992 - RNA, 17 nt, Homo sapiens
uuuacuucacuucaaaa

SEQ ID NO: 1993 - RNA, 17 nt, Homo sapiens
uacuucacuucaaaagc

SEQ ID NO: 1994 - RNA, 17 nt, Homo sapiens
uucacuucaaaagcuuu

SEQ ID NO: 1995 - RNA, 17 nt, Homo sapiens
ucaaaagcuuuuuacuc

SEQ ID NO: 1996 - RNA, 17 nt, Homo sapiens
cuuuuuacucaaagagu

SEQ ID NO: 1997 - RNA, 17 nt, Homo sapiens
uuuuacucaaagaguau

SEQ ID NO: 1998 - RNA, 17 nt, Homo sapiens
auauguucccuccaggu

SEQ ID NO: 1999 - RNA, 17 nt, Homo sapiens
uauguucccuccagguc

SEQ ID NO: 2000 - RNA, 17 nt, Homo sapiens
auguucccuccagguca

SEQ ID NO: 2001 - RNA, 17 nt, Homo sapiens
guucccuccaggucagc

SEQ ID NO: 2002 - RNA, 17 nt, Homo sapiens
uucccuccaggucagcu

SEQ ID NO: 2003 - RNA, 17 nt, Homo sapiens
uccaggucagcugcccc

SEQ ID NO: 2004 - RNA, 17 nt, Homo sapiens
aggucagcugcccccaa

SEQ ID NO: 2005 - RNA, 17 nt, Homo sapiens
ucagcugcccccaaacc

SEQ ID NO: 2006 - RNA, 17 nt, Homo sapiens
cagcugcccccaaaccc

SEQ ID NO: 2007 - RNA, 17 nt, Homo sapiens
agcugcccccaaacccc

SEQ ID NO: 2008 - RNA, 17 nt, Homo sapiens
gcugcccccaaaccccc

SEQ ID NO: 2009 - RNA, 17 nt, Homo sapiens
cugcccccaaacccccu

SEQ ID NO: 2010 - RNA, 17 nt, Homo sapiens
ccccaaacccccuccuu

SEQ ID NO: 2011 - RNA, 17 nt, Homo sapiens
cccaaacccccuccuua

SEQ ID NO: 2012 - RNA, 17 nt, Homo sapiens
ccaaacccccuccuuac

SEQ ID NO: 2013 - RNA, 17 nt, Homo sapiens
caaacccccuccuuacg

SEQ ID NO: 2014 - RNA, 17 nt, Homo sapiens
aaacccccuccuuacgc

SEQ ID NO: 2015 - RNA, 17 nt, Homo sapiens
acccccuccuuacgcuu

SEQ ID NO: 2016 - RNA, 17 nt, Homo sapiens
cccccuccuuacgcuuu

SEQ ID NO: 2017 - RNA, 17 nt, Homo sapiens
ccuuacgcuuugucaca

SEQ ID NO: 2018 - RNA, 17 nt, Homo sapiens
gcuuugucacacaaaaa

SEQ ID NO: 2019 - RNA, 17 nt, Homo sapiens
uuugucacacaaaaagu

SEQ ID NO: 2020 - RNA, 17 nt, Homo sapiens
ugucacacaaaaagugu

SEQ ID NO: 2021 - RNA, 17 nt, Homo sapiens
aaagugucucugccuug

SEQ ID NO: 2022 - RNA, 17 nt, Homo sapiens
agugucucugccuugag

SEQ ID NO: 2023 - RNA, 17 nt, Homo sapiens
gucucugccuugaguca

SEQ ID NO: 2024 - RNA, 17 nt, Homo sapiens
ucucugccuugagucau

SEQ ID NO: 2025 - RNA, 17 nt, Homo sapiens
cuugagucaucuauuca

SEQ ID NO: 2026 - RNA, 17 nt, Homo sapiens
gagucaucuauucaagc

SEQ ID NO: 2027 - RNA, 17 nt, Homo sapiens
aucuauucaagcacuua

SEQ ID NO: 2028 - RNA, 17 nt, Homo sapiens
auucaagcacuuacagc

SEQ ID NO: 2029 - RNA, 17 nt, Homo sapiens
ucaagcacuuacagcuc

SEQ ID NO: 2030 - RNA, 17 nt, Homo sapiens
gcacuuacagcucuggc

SEQ ID NO: 2031 - RNA, 17 nt, Homo sapiens
cuuacagcucuggccac

SEQ ID NO: 2032 - RNA, 17 nt, Homo sapiens
uacagcucuggccacaa

SEQ ID NO: 2033 - RNA, 17 nt, Homo sapiens
gcucuggccacaacagg

SEQ ID NO: 2034 - RNA, 17 nt, Homo sapiens
cucuggccacaacaggg

SEQ ID NO: 2035 - RNA, 17 nt, Homo sapiens
cuggccacaacagggca

SEQ ID NO: 2036 - RNA, 17 nt, Homo sapiens
gccacaacagggcauuu

SEQ ID NO: 2037 - RNA, 17 nt, Homo sapiens
aacagggcauuuuacag

SEQ ID NO: 2038 - RNA, 17 nt, Homo sapiens
cauuuuacaggugcgaa

SEQ ID NO: 2039 - RNA, 17 nt, Homo sapiens
cgaaugacaguagcauu

SEQ ID NO: 2040 - RNA, 17 nt, Homo sapiens
acaguagcauuaugagu

SEQ ID NO: 2041 - RNA, 17 nt, Homo sapiens
gugaauucagguaguaa

SEQ ID NO: 2042 - RNA, 17 nt, Homo sapiens
uaugaaacuaggguuug

SEQ ID NO: 2043 - RNA, 17 nt, Homo sapiens
gauaaugcuuucacaac

SEQ ID NO: 2044 - RNA, 17 nt, Homo sapiens
augcuuucacaacauuu

SEQ ID NO: 2045 - RNA, 17 nt, Homo sapiens
gcuuucacaacauuugc

SEQ ID NO: 2046 - RNA, 17 nt, Homo sapiens
uucacaacauuugcaga

SEQ ID NO: 2047 - RNA, 17 nt, Homo sapiens
acauuugcagauguuuu

SEQ ID NO: 2048 - RNA, 17 nt, Homo sapiens
aaaaguuccuuccuaaa

SEQ ID NO: 2049 - RNA, 17 nt, Homo sapiens
aaaguuccuuccuaaaa

SEQ ID NO: 2050 - RNA, 17 nt, Homo sapiens
guuccuuccuaaaauaa

SEQ ID NO: 2051 - RNA, 17 nt, Homo sapiens
uuccuuccuaaaauaau

SEQ ID NO: 2052 - RNA, 17 nt, Homo sapiens
auaauuucucuacaauu

SEQ ID NO: 2053 - RNA, 17 nt, Homo sapiens
aauuucucuacaauugg

SEQ ID NO: 2054 - RNA, 17 nt, Homo sapiens
uucucuacaauuggaag

SEQ ID NO: 2055 - RNA, 17 nt, Homo sapiens
gaagauucagcuaguua

SEQ ID NO: 2056 - RNA, 17 nt, Homo sapiens
gauucagcuaguuagga

SEQ ID NO: 2057 - RNA, 17 nt, Homo sapiens
uuaggagcccauuuuuu

SEQ ID NO: 2058 - RNA, 17 nt, Homo sapiens
uaggagcccauuuuuuc

SEQ ID NO: 2059 - RNA, 17 nt, Homo sapiens
aggagcccauuuuuucc

SEQ ID NO: 2060 - RNA, 17 nt, Homo sapiens
auuuuuuccuaaucugu

SEQ ID NO: 2061 - RNA, 17 nt, Homo sapiens
uuuuuuccuaaucugug

SEQ ID NO: 2062 - RNA, 17 nt, Homo sapiens
uccuaaucugugugugc

SEQ ID NO: 2063 - RNA, 17 nt, Homo sapiens
gugugugcccuguaacc

SEQ ID NO: 2064 - RNA, 17 nt, Homo sapiens
ugugugcccuguaaccu

SEQ ID NO: 2065 - RNA, 17 nt, Homo sapiens
gugugcccuguaaccug

SEQ ID NO: 2066 - RNA, 17 nt, Homo sapiens
ccuguaaccugacuggu

SEQ ID NO: 2067 - RNA, 17 nt, Homo sapiens
cuguaaccugacugguu

SEQ ID NO: 2068 - RNA, 17 nt, Homo sapiens
aaccugacugguuaaca

SEQ ID NO: 2069 - RNA, 17 nt, Homo sapiens
ugguuaacagcaguccu

SEQ ID NO: 2070 - RNA, 17 nt, Homo sapiens
uuaacagcaguccuuug

SEQ ID NO: 2071 - RNA, 17 nt, Homo sapiens
cagcaguccuuuguaaa

SEQ ID NO: 2072 - RNA, 17 nt, Homo sapiens
agcaguccuuuguaaac

SEQ ID NO: 2073 - RNA, 17 nt, Homo sapiens
uuguaaacaguguuuua

SEQ ID NO: 2074 - RNA, 17 nt, Homo sapiens
uuuuaaacucuccuagu

SEQ ID NO: 2075 - RNA, 17 nt, Homo sapiens
uuaaacucuccuaguca

SEQ ID NO: 2076 - RNA, 17 nt, Homo sapiens
aaacucuccuagucaau

SEQ ID NO: 2077 - RNA, 17 nt, Homo sapiens
aacucuccuagucaaua

SEQ ID NO: 2078 - RNA, 17 nt, Homo sapiens
uccuagucaauauccac

SEQ ID NO: 2079 - RNA, 17 nt, Homo sapiens
ucaauauccaccccauc

SEQ ID NO: 2080 - RNA, 17 nt, Homo sapiens
caauauccaccccaucc

SEQ ID NO: 2081 - RNA, 17 nt, Homo sapiens
auauccaccccauccaa

SEQ ID NO: 2082 - RNA, 17 nt, Homo sapiens
uauccaccccauccaau

SEQ ID NO: 2083 - RNA, 17 nt, Homo sapiens
auccaccccauccaauu

SEQ ID NO: 2084 - RNA, 17 nt, Homo sapiens
uccaccccauccaauuu

SEQ ID NO: 2085 - RNA, 17 nt, Homo sapiens
accccauccaauuuauc

SEQ ID NO: 2086 - RNA, 17 nt, Homo sapiens
ccccauccaauuuauca

SEQ ID NO: 2087 - RNA, 17 nt, Homo sapiens
aauuuaucaaggaagaa

SEQ ID NO: 2088 - RNA, 17 nt, Homo sapiens
aaugguucagaaaauau

SEQ ID NO: 2089 - RNA, 17 nt, Homo sapiens
auauuuucagccuacag

SEQ ID NO: 2090 - RNA, 17 nt, Homo sapiens
uuuucagccuacaguua

SEQ ID NO: 2091 - RNA, 17 nt, Homo sapiens
uuucagccuacaguuau

SEQ ID NO: 2092 - RNA, 17 nt, Homo sapiens
cagccuacaguuauguu

SEQ ID NO: 2093 - RNA, 17 nt, Homo sapiens
uuauguucagucacaca

SEQ ID NO: 2094 - RNA, 17 nt, Homo sapiens
guucagucacacacaca

SEQ ID NO: 2095 - RNA, 17 nt, Homo sapiens
ucagucacacacacaua

SEQ ID NO: 2096 - RNA, 17 nt, Homo sapiens
agucacacacacauaca

SEQ ID NO: 2097 - RNA, 17 nt, Homo sapiens
ucacacacacauacaaa

SEQ ID NO: 2098 - RNA, 17 nt, Homo sapiens
acacacacauacaaaau

SEQ ID NO: 2099 - RNA, 17 nt, Homo sapiens
acacauacaaaauguuc

SEQ ID NO: 2100 - RNA, 17 nt, Homo sapiens
aaauguuccuuuugcuu

SEQ ID NO: 2101 - RNA, 17 nt, Homo sapiens
aauguuccuuuugcuuu

SEQ ID NO: 2102 - RNA, 17 nt, Homo sapiens
ccuuuugcuuuuaaagu

SEQ ID NO: 2103 - RNA, 17 nt, Homo sapiens
uuuuugacucccagauc

SEQ ID NO: 2104 - RNA, 17 nt, Homo sapiens
uuugacucccagaucag

SEQ ID NO: 2105 - RNA, 17 nt, Homo sapiens
uugacucccagaucagu

SEQ ID NO: 2106 - RNA, 17 nt, Homo sapiens
ugacucccagaucaguc

SEQ ID NO: 2107 - RNA, 17 nt, Homo sapiens
cccagaucagucagagc

SEQ ID NO: 2108 - RNA, 17 nt, Homo sapiens
gaucagucagagccccu

SEQ ID NO: 2109 - RNA, 17 nt, Homo sapiens
gucagagccccuacagc

SEQ ID NO: 2110 - RNA, 17 nt, Homo sapiens
ucagagccccuacagca

SEQ ID NO: 2111 - RNA, 17 nt, Homo sapiens
cagagccccuacagcau

SEQ ID NO: 2112 - RNA, 17 nt, Homo sapiens
agagccccuacagcauu

SEQ ID NO: 2113 - RNA, 17 nt, Homo sapiens
gccccuacagcauuguu

SEQ ID NO: 2114 - RNA, 17 nt, Homo sapiens
ccuacagcauuguuaag

SEQ ID NO: 2115 - RNA, 17 nt, Homo sapiens
uuuuugucucaaugaaa

SEQ ID NO: 2116 - RNA, 17 nt, Homo sapiens
uuugucucaaugaaaau

SEQ ID NO: 2117 - RNA, 17 nt, Homo sapiens
aauaaaacuauauucau

SEQ ID NO: 2118 - RNA, 17 nt, Homo sapiens
gccgcgcugcgccggag

SEQ ID NO: 2119 - RNA, 17 nt, Homo sapiens
cgcgcugcgccggaguc

SEQ ID NO: 2120 - RNA, 17 nt, Homo sapiens
gcgccggagucccgagc

SEQ ID NO: 2121 - RNA, 17 nt, Homo sapiens
agucccgagcuagcccc

SEQ ID NO: 2122 - RNA, 17 nt, Homo sapiens
ccgagcuagccccggcg

SEQ ID NO: 2123 - RNA, 17 nt, Homo sapiens
uagccccggcgccgccg

SEQ ID NO: 2124 - RNA, 17 nt, Homo sapiens
gccccggcgccgccgcc

SEQ ID NO: 2125 - RNA, 17 nt, Homo sapiens
ccggcgccgccgccgcc

SEQ ID NO: 2126 - RNA, 17 nt, Homo sapiens
gcgccgccgccgcccag

SEQ ID NO: 2127 - RNA, 17 nt, Homo sapiens
ccgccgccgcccagacc

SEQ ID NO: 2128 - RNA, 17 nt, Homo sapiens
gacgacaggccaccucg

SEQ ID NO: 2129 - RNA, 17 nt, Homo sapiens
gccaccucgucggcguc

SEQ ID NO: 2130 - RNA, 17 nt, Homo sapiens
ccucgucggcguccgcc

SEQ ID NO: 2131 - RNA, 17 nt, Homo sapiens
ucgucggcguccgcccg

SEQ ID NO: 2132 - RNA, 17 nt, Homo sapiens
cggcguccgcccgaguc

SEQ ID NO: 2133 - RNA, 17 nt, Homo sapiens
ccgcccgaguccccgcc

SEQ ID NO: 2134 - RNA, 17 nt, Homo sapiens
gaguccccgccucgccg

SEQ ID NO: 2135 - RNA, 17 nt, Homo sapiens
cccgccucgccgccaac

SEQ ID NO: 2136 - RNA, 17 nt, Homo sapiens
gccucgccgccaacgcc

SEQ ID NO: 2137 - RNA, 17 nt, Homo sapiens
ccgccaacgccacaacc

SEQ ID NO: 2138 - RNA, 17 nt, Homo sapiens
caaccaccgcgcacggc

SEQ ID NO: 2139 - RNA, 17 nt, Homo sapiens
accaccgcgcacggccc

SEQ ID NO: 2140 - RNA, 17 nt, Homo sapiens
cgcgcacggcccccuga

SEQ ID NO: 2141 - RNA, 17 nt, Homo sapiens
cugacuccguccaguau

SEQ ID NO: 2142 - RNA, 17 nt, Homo sapiens
uccguccaguauugauc

SEQ ID NO: 2143 - RNA, 17 nt, Homo sapiens
ucgggagagccggagcg

SEQ ID NO: 2144 - RNA, 17 nt, Homo sapiens
gagccggagcgagcucu

SEQ ID NO: 2145 - RNA, 17 nt, Homo sapiens
cggagcgagcucuucgg

SEQ ID NO: 2146 - RNA, 17 nt, Homo sapiens
uucggggagcagcgaug

SEQ ID NO: 2147 - RNA, 17 nt, Homo sapiens
ggggagcagcgaugcga

SEQ ID NO: 2148 - RNA, 17 nt, Homo sapiens
gcagcgaugcgacccuc

SEQ ID NO: 2149 - RNA, 17 nt, Homo sapiens
ccgggacggccggggca

SEQ ID NO: 2150 - RNA, 17 nt, Homo sapiens
cggccggggcagcgcuc

SEQ ID NO: 2151 - RNA, 17 nt, Homo sapiens
ccggggcagcgcuccug

SEQ ID NO: 2152 - RNA, 17 nt, Homo sapiens
ggggcagcgcuccuggc

SEQ ID NO: 2153 - RNA, 17 nt, Homo sapiens
cgcuccuggcgcugcug

SEQ ID NO: 2154 - RNA, 17 nt, Homo sapiens
cuccuggcgcugcuggc

SEQ ID NO: 2155 - RNA, 17 nt, Homo sapiens
cuggcgcugcuggcugc

SEQ ID NO: 2156 - RNA, 17 nt, Homo sapiens
cgcugcuggcugcgcuc

SEQ ID NO: 2157 - RNA, 17 nt, Homo sapiens
ugcuggcugcgcucugc

SEQ ID NO: 2158 - RNA, 17 nt, Homo sapiens
cuggcugcgcucugccc

SEQ ID NO: 2159 - RNA, 17 nt, Homo sapiens
ugcgcucugcccggcga

SEQ ID NO: 2160 - RNA, 17 nt, Homo sapiens
ucugcccggcgagucgg

SEQ ID NO: 2161 - RNA, 17 nt, Homo sapiens
cccggcgagucgggcuc

SEQ ID NO: 2162 - RNA, 17 nt, Homo sapiens
cgagucgggcucuggag

SEQ ID NO: 2163 - RNA, 17 nt, Homo sapiens
aaaagaaaguuugccaa

SEQ ID NO: 2164 - RNA, 17 nt, Homo sapiens
gaaaguuugccaaggca

SEQ ID NO: 2165 - RNA, 17 nt, Homo sapiens
uugccaaggcacgagua

SEQ ID NO: 2166 - RNA, 17 nt, Homo sapiens
aggcacgaguaacaagc

SEQ ID NO: 2167 - RNA, 17 nt, Homo sapiens
aguaacaagcucacgca

SEQ ID NO: 2168 - RNA, 17 nt, Homo sapiens
aagcucacgcaguuggg

SEQ ID NO: 2169 - RNA, 17 nt, Homo sapiens
cucacgcaguugggcac

SEQ ID NO: 2170 - RNA, 17 nt, Homo sapiens
gcaguugggcacuuuug

SEQ ID NO: 2171 - RNA, 17 nt, Homo sapiens
uuuucucagccuccaga

SEQ ID NO: 2172 - RNA, 17 nt, Homo sapiens
cagaggauguucaauaa

SEQ ID NO: 2173 - RNA, 17 nt, Homo sapiens
caauaacugugaggugg

SEQ ID NO: 2174 - RNA, 17 nt, Homo sapiens
acugugaggugguccuu

SEQ ID NO: 2175 - RNA, 17 nt, Homo sapiens
gugaggugguccuuggg

SEQ ID NO: 2176 - RNA, 17 nt, Homo sapiens
uuaccuaugugcagagg

SEQ ID NO: 2177 - RNA, 17 nt, Homo sapiens
accuaugugcagaggaa

SEQ ID NO: 2178 - RNA, 17 nt, Homo sapiens
uccaggagguggcuggu

SEQ ID NO: 2179 - RNA, 17 nt, Homo sapiens
aggagguggcugguuau

SEQ ID NO: 2180 - RNA, 17 nt, Homo sapiens
gguggcugguuaugucc

SEQ ID NO: 2181 - RNA, 17 nt, Homo sapiens
cugguuauguccucauu

SEQ ID NO: 2182 - RNA, 17 nt, Homo sapiens
uccucauugcccucaac

SEQ ID NO: 2183 - RNA, 17 nt, Homo sapiens
ucaacacaguggagcga

SEQ ID NO: 2184 - RNA, 17 nt, Homo sapiens
acaguggagcgaauucc

SEQ ID NO: 2185 - RNA, 17 nt, Homo sapiens
gaaaaccugcagaucau

SEQ ID NO: 2186 - RNA, 17 nt, Homo sapiens
ggaaauauguacuacga

SEQ ID NO: 2187 - RNA, 17 nt, Homo sapiens
auuccuaugccuuagca

SEQ ID NO: 2188 - RNA, 17 nt, Homo sapiens
augccuuagcagucuua

SEQ ID NO: 2189 - RNA, 17 nt, Homo sapiens
ccuuagcagucuuaucu

SEQ ID NO: 2190 - RNA, 17 nt, Homo sapiens
acuaugaugcaaauaaa

SEQ ID NO: 2191 - RNA, 17 nt, Homo sapiens
cugaaggagcugcccau

SEQ ID NO: 2192 - RNA, 17 nt, Homo sapiens
aaggagcugcccaugag

SEQ ID NO: 2193 - RNA, 17 nt, Homo sapiens
gaaauccugcauggcgc

SEQ ID NO: 2194 - RNA, 17 nt, Homo sapiens
ccugcauggcgccgugc

SEQ ID NO: 2195 - RNA, 17 nt, Homo sapiens
ugcauggcgccgugcgg

SEQ ID NO: 2196 - RNA, 17 nt, Homo sapiens
auggcgccgugcgguuc

SEQ ID NO: 2197 - RNA, 17 nt, Homo sapiens
ggcgccgugcgguucag

SEQ ID NO: 2198 - RNA, 17 nt, Homo sapiens
gccgugcgguucagcaa

SEQ ID NO: 2199 - RNA, 17 nt, Homo sapiens
gcgguucagcaacaacc

SEQ ID NO: 2200 - RNA, 17 nt, Homo sapiens
acaacccugcccugugc

SEQ ID NO: 2201 - RNA, 17 nt, Homo sapiens
ccugcccugugcaacgu

SEQ ID NO: 2202 - RNA, 17 nt, Homo sapiens
ugcccugugcaacgugg

SEQ ID NO: 2203 - RNA, 17 nt, Homo sapiens
ugugcaacguggagagc

SEQ ID NO: 2204 - RNA, 17 nt, Homo sapiens
cguggagagcauccagu

SEQ ID NO: 2205 - RNA, 17 nt, Homo sapiens
agcauccaguggcggga

SEQ ID NO: 2206 - RNA, 17 nt, Homo sapiens
auccaguggcgggacau

SEQ ID NO: 2207 - RNA, 17 nt, Homo sapiens
gggacauagucagcagu

SEQ ID NO: 2208 - RNA, 17 nt, Homo sapiens
cauagucagcagugacu

SEQ ID NO: 2209 - RNA, 17 nt, Homo sapiens
agucagcagugacuuuc

SEQ ID NO: 2210 - RNA, 17 nt, Homo sapiens
cuuucucagcaacaugu

SEQ ID NO: 2211 - RNA, 17 nt, Homo sapiens
agcaacaugucgaugga

SEQ ID NO: 2212 - RNA, 17 nt, Homo sapiens
ccaccugggcagcugcc

SEQ ID NO: 2213 - RNA, 17 nt, Homo sapiens
ccugggcagcugccaaa

SEQ ID NO: 2214 - RNA, 17 nt, Homo sapiens
gggcagcugccaaaagu

SEQ ID NO: 2215 - RNA, 17 nt, Homo sapiens
ugccaaaagugugaucc

SEQ ID NO: 2216 - RNA, 17 nt, Homo sapiens
ccaaaagugugauccaa

SEQ ID NO: 2217 - RNA, 17 nt, Homo sapiens
ugauccaagcuguccca

SEQ ID NO: 2218 - RNA, 17 nt, Homo sapiens
uccaagcugucccaaug

SEQ ID NO: 2219 - RNA, 17 nt, Homo sapiens
caaugggagcugcuggg

SEQ ID NO: 2220 - RNA, 17 nt, Homo sapiens
ugggagcugcuggggug

SEQ ID NO: 2221 - RNA, 17 nt, Homo sapiens
cugcuggggugcaggag

SEQ ID NO: 2222 - RNA, 17 nt, Homo sapiens
gcuggggugcaggagag

SEQ ID NO: 2223 - RNA, 17 nt, Homo sapiens
ggagaacugccagaaac

SEQ ID NO: 2224 - RNA, 17 nt, Homo sapiens
aaucaucugugcccagc

SEQ ID NO: 2225 - RNA, 17 nt, Homo sapiens
ucaucugugcccagcag

SEQ ID NO: 2226 - RNA, 17 nt, Homo sapiens
ugugcccagcagugcuc

SEQ ID NO: 2227 - RNA, 17 nt, Homo sapiens
gcccagcagugcuccgg

SEQ ID NO: 2228 - RNA, 17 nt, Homo sapiens
ccagcagugcuccgggc

SEQ ID NO: 2229 - RNA, 17 nt, Homo sapiens
ugcuccgggcgcugccg

SEQ ID NO: 2230 - RNA, 17 nt, Homo sapiens
cuccgggcgcugccgug

SEQ ID NO: 2231 - RNA, 17 nt, Homo sapiens
cgggcgcugccguggca

SEQ ID NO: 2232 - RNA, 17 nt, Homo sapiens
gcgcugccguggcaagu

SEQ ID NO: 2233 - RNA, 17 nt, Homo sapiens
cugccguggcaaguccc

SEQ ID NO: 2234 - RNA, 17 nt, Homo sapiens
cguggcaagucccccag

SEQ ID NO: 2235 - RNA, 17 nt, Homo sapiens
gucccccagugacugcu

SEQ ID NO: 2236 - RNA, 17 nt, Homo sapiens
cagugacugcugccaca

SEQ ID NO: 2237 - RNA, 17 nt, Homo sapiens
ugacugcugccacaacc

SEQ ID NO: 2238 - RNA, 17 nt, Homo sapiens
cacaaccagugugcugc

SEQ ID NO: 2239 - RNA, 17 nt, Homo sapiens
caaccagugugcugcag

SEQ ID NO: 2240 - RNA, 17 nt, Homo sapiens
accagugugcugcaggc

SEQ ID NO: 2241 - RNA, 17 nt, Homo sapiens
agugugcugcaggcugc

SEQ ID NO: 2242 - RNA, 17 nt, Homo sapiens
ugcugcaggcugcacag

SEQ ID NO: 2243 - RNA, 17 nt, Homo sapiens
ugcaggcugcacaggcc

SEQ ID NO: 2244 - RNA, 17 nt, Homo sapiens
cugcacaggcccccggg

SEQ ID NO: 2245 - RNA, 17 nt, Homo sapiens
ccgggagagcgacugcc

SEQ ID NO: 2246 - RNA, 17 nt, Homo sapiens
gagcgacugccuggucu

SEQ ID NO: 2247 - RNA, 17 nt, Homo sapiens
acugccuggucugccgc

SEQ ID NO: 2248 - RNA, 17 nt, Homo sapiens
ccuggucugccgcaaau

SEQ ID NO: 2249 - RNA, 17 nt, Homo sapiens
ggucugccgcaaauucc

SEQ ID NO: 2250 - RNA, 17 nt, Homo sapiens
gagacgaagccacgugc

SEQ ID NO: 2251 - RNA, 17 nt, Homo sapiens
gaagccacgugcaagga

SEQ ID NO: 2252 - RNA, 17 nt, Homo sapiens
agccacgugcaaggaca

SEQ ID NO: 2253 - RNA, 17 nt, Homo sapiens
ggacaccugccccccac

SEQ ID NO: 2254 - RNA, 17 nt, Homo sapiens
ccacucaugcucuacaa

SEQ ID NO: 2255 - RNA, 17 nt, Homo sapiens
cccaccacguaccagau

SEQ ID NO: 2256 - RNA, 17 nt, Homo sapiens
agauggaugugaacccc

SEQ ID NO: 2257 - RNA, 17 nt, Homo sapiens
ccccgagggcaaauaca

SEQ ID NO: 2258 - RNA, 17 nt, Homo sapiens
caaauacagcuuuggug

SEQ ID NO: 2259 - RNA, 17 nt, Homo sapiens
cagcuuuggugccaccu

SEQ ID NO: 2260 - RNA, 17 nt, Homo sapiens
gcuuuggugccaccugc

SEQ ID NO: 2261 - RNA, 17 nt, Homo sapiens
ugccaccugcgugaaga

SEQ ID NO: 2262 - RNA, 17 nt, Homo sapiens
ccaccugcgugaagaag

SEQ ID NO: 2263 - RNA, 17 nt, Homo sapiens
gugaagaaguguccccg

SEQ ID NO: 2264 - RNA, 17 nt, Homo sapiens
gaagaaguguccccgua

SEQ ID NO: 2265 - RNA, 17 nt, Homo sapiens
guguccccguaauuaug

SEQ ID NO: 2266 - RNA, 17 nt, Homo sapiens
guaauuauguggugaca

SEQ ID NO: 2267 - RNA, 17 nt, Homo sapiens
auuauguggugacagau

SEQ ID NO: 2268 - RNA, 17 nt, Homo sapiens
agaucacggcucgugcg

SEQ ID NO: 2269 - RNA, 17 nt, Homo sapiens
cacggcucgugcguccg

SEQ ID NO: 2270 - RNA, 17 nt, Homo sapiens
cggcucgugcguccgag

SEQ ID NO: 2271 - RNA, 17 nt, Homo sapiens
gcucgugcguccgagcc

SEQ ID NO: 2272 - RNA, 17 nt, Homo sapiens
gcguccgagccuguggg

SEQ ID NO: 2273 - RNA, 17 nt, Homo sapiens
ccgagccuguggggccg

SEQ ID NO: 2274 - RNA, 17 nt, Homo sapiens
ccuguggggccgacagc

SEQ ID NO: 2275 - RNA, 17 nt, Homo sapiens
ggccgacagcuaugaga

SEQ ID NO: 2276 - RNA, 17 nt, Homo sapiens
ggaagacggcguccgca

SEQ ID NO: 2277 - RNA, 17 nt, Homo sapiens
aagacggcguccgcaag

SEQ ID NO: 2278 - RNA, 17 nt, Homo sapiens
cggcguccgcaagugua

SEQ ID NO: 2279 - RNA, 17 nt, Homo sapiens
guccgcaaguguaagaa

SEQ ID NO: 2280 - RNA, 17 nt, Homo sapiens
ccgcaaguguaagaagu

SEQ ID NO: 2281 - RNA, 17 nt, Homo sapiens
uguaagaagugcgaagg

SEQ ID NO: 2282 - RNA, 17 nt, Homo sapiens
uaagaagugcgaagggc

SEQ ID NO: 2283 - RNA, 17 nt, Homo sapiens
ugcgaagggccuugccg

SEQ ID NO: 2284 - RNA, 17 nt, Homo sapiens
agggccuugccgcaaag

SEQ ID NO: 2285 - RNA, 17 nt, Homo sapiens
gccuugccgcaaagugu

SEQ ID NO: 2286 - RNA, 17 nt, Homo sapiens
gccgcaaaguguguaac

SEQ ID NO: 2287 - RNA, 17 nt, Homo sapiens
cgcaaaguguguaacgg

SEQ ID NO: 2288 - RNA, 17 nt, Homo sapiens
caaaguguguaacggaa

SEQ ID NO: 2289 - RNA, 17 nt, Homo sapiens
cggaauagguauuggug

SEQ ID NO: 2290 - RNA, 17 nt, Homo sapiens
agguauuggugaauuua

SEQ ID NO: 2291 - RNA, 17 nt, Homo sapiens
ccauaaaugcuacgaau

SEQ ID NO: 2292 - RNA, 17 nt, Homo sapiens
caaaaacugcaccucca

SEQ ID NO: 2293 - RNA, 17 nt, Homo sapiens
cuccaucaguggcgauc

SEQ ID NO: 2294 - RNA, 17 nt, Homo sapiens
caucaguggcgaucucc

SEQ ID NO: 2295 - RNA, 17 nt, Homo sapiens
cacauccugccgguggc

SEQ ID NO: 2296 - RNA, 17 nt, Homo sapiens
uccugccgguggcauuu

SEQ ID NO: 2297 - RNA, 17 nt, Homo sapiens
ugccgguggcauuuagg

SEQ ID NO: 2298 - RNA, 17 nt, Homo sapiens
auuuaggggugacuccu

SEQ ID NO: 2299 - RNA, 17 nt, Homo sapiens
ugaaaaccguaaaggaa

SEQ ID NO: 2300 - RNA, 17 nt, Homo sapiens
aucacaggguuuuugcu

SEQ ID NO: 2301 - RNA, 17 nt, Homo sapiens
ggguuuuugcugauuca

SEQ ID NO: 2302 - RNA, 17 nt, Homo sapiens
ugauucaggcuuggccu

SEQ ID NO: 2303 - RNA, 17 nt, Homo sapiens
caggcuuggccugaaaa

SEQ ID NO: 2304 - RNA, 17 nt, Homo sapiens
accuccaugccuuugag

SEQ ID NO: 2305 - RNA, 17 nt, Homo sapiens
aaucauacgcggcagga

SEQ ID NO: 2306 - RNA, 17 nt, Homo sapiens
cauacgcggcaggacca

SEQ ID NO: 2307 - RNA, 17 nt, Homo sapiens
aggaccaagcaacaugg

SEQ ID NO: 2308 - RNA, 17 nt, Homo sapiens
gcaacauggucaguuuu

SEQ ID NO: 2309 - RNA, 17 nt, Homo sapiens
cauggucaguuuucucu

SEQ ID NO: 2310 - RNA, 17 nt, Homo sapiens
uuucucuugcagucguc

SEQ ID NO: 2311 - RNA, 17 nt, Homo sapiens
cucuugcagucgucagc

SEQ ID NO: 2312 - RNA, 17 nt, Homo sapiens
uugcagucgucagccug

SEQ ID NO: 2313 - RNA, 17 nt, Homo sapiens
agucgucagccugaaca

SEQ ID NO: 2314 - RNA, 17 nt, Homo sapiens
gggauuacgcucccuca

SEQ ID NO: 2315 - RNA, 17 nt, Homo sapiens
ggagauaagugauggag

SEQ ID NO: 2316 - RNA, 17 nt, Homo sapiens
auggagaugugauaauu

SEQ ID NO: 2317 - RNA, 17 nt, Homo sapiens
aaaaauuugugcuaugc

SEQ ID NO: 2318 - RNA, 17 nt, Homo sapiens
aaauuugugcuaugcaa

SEQ ID NO: 2319 - RNA, 17 nt, Homo sapiens
ugugcuaugcaaauaca

SEQ ID NO: 2320 - RNA, 17 nt, Homo sapiens
aaaaaacuguuugggac

SEQ ID NO: 2321 - RNA, 17 nt, Homo sapiens
gaccuccggucagaaaa

SEQ ID NO: 2322 - RNA, 17 nt, Homo sapiens
aauuauaagcaacagag

SEQ ID NO: 2323 - RNA, 17 nt, Homo sapiens
caacagaggugaaaaca

SEQ ID NO: 2324 - RNA, 17 nt, Homo sapiens
ugaaaacagcugcaagg

SEQ ID NO: 2325 - RNA, 17 nt, Homo sapiens
aaacagcugcaaggcca

SEQ ID NO: 2326 - RNA, 17 nt, Homo sapiens
gcugcaaggccacaggc

SEQ ID NO: 2327 - RNA, 17 nt, Homo sapiens
ggccacaggccaggucu

SEQ ID NO: 2328 - RNA, 17 nt, Homo sapiens
caggccaggucugccau

SEQ ID NO: 2329 - RNA, 17 nt, Homo sapiens
ccaggucugccaugccu

SEQ ID NO: 2330 - RNA, 17 nt, Homo sapiens
ucugccaugccuugugc

SEQ ID NO: 2331 - RNA, 17 nt, Homo sapiens
caugccuugugcucccc

SEQ ID NO: 2332 - RNA, 17 nt, Homo sapiens
ugccuugugcucccccg

SEQ ID NO: 2333 - RNA, 17 nt, Homo sapiens
ccccgagggcugcuggg

SEQ ID NO: 2334 - RNA, 17 nt, Homo sapiens
cgagggcugcuggggcc

SEQ ID NO: 2335 - RNA, 17 nt, Homo sapiens
cugcuggggcccggagc

SEQ ID NO: 2336 - RNA, 17 nt, Homo sapiens
ggcccggagcccaggga

SEQ ID NO: 2337 - RNA, 17 nt, Homo sapiens
cagggacugcgucucuu

SEQ ID NO: 2338 - RNA, 17 nt, Homo sapiens
gggacugcgucucuugc

SEQ ID NO: 2339 - RNA, 17 nt, Homo sapiens
cgucucuugccggaaug

SEQ ID NO: 2340 - RNA, 17 nt, Homo sapiens
gccggaaugucagccga

SEQ ID NO: 2341 - RNA, 17 nt, Homo sapiens
gaaugucagccgaggca

SEQ ID NO: 2342 - RNA, 17 nt, Homo sapiens
cagccgaggcagggaau

SEQ ID NO: 2343 - RNA, 17 nt, Homo sapiens
cagggaaugcguggaca

SEQ ID NO: 2344 - RNA, 17 nt, Homo sapiens
gggaaugcguggacaag

SEQ ID NO: 2345 - RNA, 17 nt, Homo sapiens
guggacaagugcaagcu

SEQ ID NO: 2346 - RNA, 17 nt, Homo sapiens
ggacaagugcaagcuuc

SEQ ID NO: 2347 - RNA, 17 nt, Homo sapiens
aagugcaagcuucugga

SEQ ID NO: 2348 - RNA, 17 nt, Homo sapiens
ucuggagggugagccaa

SEQ ID NO: 2349 - RNA, 17 nt, Homo sapiens
gagggugagccaaggga

SEQ ID NO: 2350 - RNA, 17 nt, Homo sapiens
ccaagggaguuugugga

SEQ ID NO: 2351 - RNA, 17 nt, Homo sapiens
gggaguuuguggagaac

SEQ ID NO: 2352 - RNA, 17 nt, Homo sapiens
aacucugagugcauaca

SEQ ID NO: 2353 - RNA, 17 nt, Homo sapiens
cucugagugcauacagu

SEQ ID NO: 2354 - RNA, 17 nt, Homo sapiens
ugcauacagugccaccc

SEQ ID NO: 2355 - RNA, 17 nt, Homo sapiens
cauacagugccacccag

SEQ ID NO: 2356 - RNA, 17 nt, Homo sapiens
cacccagagugccugcc

SEQ ID NO: 2357 - RNA, 17 nt, Homo sapiens
cccagagugccugccuc

SEQ ID NO: 2358 - RNA, 17 nt, Homo sapiens
gagugccugccucaggc

SEQ ID NO: 2359 - RNA, 17 nt, Homo sapiens
ugccucaggccaugaac

SEQ ID NO: 2360 - RNA, 17 nt, Homo sapiens
caucaccugcacaggac

SEQ ID NO: 2361 - RNA, 17 nt, Homo sapiens
agacaacuguauccagu

SEQ ID NO: 2362 - RNA, 17 nt, Homo sapiens
uguauccagugugccca

SEQ ID NO: 2363 - RNA, 17 nt, Homo sapiens
uauccagugugcccacu

SEQ ID NO: 2364 - RNA, 17 nt, Homo sapiens
uccagugugcccacuac

SEQ ID NO: 2365 - RNA, 17 nt, Homo sapiens
cauugacggcccccacu

SEQ ID NO: 2366 - RNA, 17 nt, Homo sapiens
cccccacugcgucaaga

SEQ ID NO: 2367 - RNA, 17 nt, Homo sapiens
cccacugcgucaagacc

SEQ ID NO: 2368 - RNA, 17 nt, Homo sapiens
caagaccugcccggcag

SEQ ID NO: 2369 - RNA, 17 nt, Homo sapiens
ccugcccggcaggaguc

SEQ ID NO: 2370 - RNA, 17 nt, Homo sapiens
cggcaggagucauggga

SEQ ID NO: 2371 - RNA, 17 nt, Homo sapiens
acacccuggucuggaag

SEQ ID NO: 2372 - RNA, 17 nt, Homo sapiens
gucuggaaguacgcaga

SEQ ID NO: 2373 - RNA, 17 nt, Homo sapiens
ggaaguacgcagacgcc

SEQ ID NO: 2374 - RNA, 17 nt, Homo sapiens
acgcagacgccggccau

SEQ ID NO: 2375 - RNA, 17 nt, Homo sapiens
agacgccggccaugugu

SEQ ID NO: 2376 - RNA, 17 nt, Homo sapiens
ccggccaugugugccac

SEQ ID NO: 2377 - RNA, 17 nt, Homo sapiens
ggccaugugugccaccu

SEQ ID NO: 2378 - RNA, 17 nt, Homo sapiens
ccaugugugccaccugu

SEQ ID NO: 2379 - RNA, 17 nt, Homo sapiens
ugccaccugugccaucc

SEQ ID NO: 2380 - RNA, 17 nt, Homo sapiens
ccaccugugccauccaa

SEQ ID NO: 2381 - RNA, 17 nt, Homo sapiens
uccaaacugcaccuacg

SEQ ID NO: 2382 - RNA, 17 nt, Homo sapiens
cuacggaugcacugggc

SEQ ID NO: 2383 - RNA, 17 nt, Homo sapiens
ugcacugggccaggucu

SEQ ID NO: 2384 - RNA, 17 nt, Homo sapiens
ugggccaggucuugaag

SEQ ID NO: 2385 - RNA, 17 nt, Homo sapiens
ucuugaaggcuguccaa

SEQ ID NO: 2386 - RNA, 17 nt, Homo sapiens
ugaaggcuguccaacga

SEQ ID NO: 2387 - RNA, 17 nt, Homo sapiens
acgaaugggccuaagau

SEQ ID NO: 2388 - RNA, 17 nt, Homo sapiens
aagaucccguccaucgc

SEQ ID NO: 2389 - RNA, 17 nt, Homo sapiens
cguccaucgccacuggg

SEQ ID NO: 2390 - RNA, 17 nt, Homo sapiens
cugggauggugggggcc

SEQ ID NO: 2391 - RNA, 17 nt, Homo sapiens
uggugggggcccuccuc

SEQ ID NO: 2392 - RNA, 17 nt, Homo sapiens
cuccucuugcugcuggu

SEQ ID NO: 2393 - RNA, 17 nt, Homo sapiens
cucuugcugcugguggu

SEQ ID NO: 2394 - RNA, 17 nt, Homo sapiens
ugcugcuggugguggcc

SEQ ID NO: 2395 - RNA, 17 nt, Homo sapiens
ugcuggugguggcccug

SEQ ID NO: 2396 - RNA, 17 nt, Homo sapiens
uggugguggcccugggg

SEQ ID NO: 2397 - RNA, 17 nt, Homo sapiens
ggggaucggccucuuca

SEQ ID NO: 2398 - RNA, 17 nt, Homo sapiens
cucuucaugcgaaggcg

SEQ ID NO: 2399 - RNA, 17 nt, Homo sapiens
augcgaaggcgccacau

SEQ ID NO: 2400 - RNA, 17 nt, Homo sapiens
gcgaaggcgccacaucg

SEQ ID NO: 2401 - RNA, 17 nt, Homo sapiens
gccacaucguucggaag

SEQ ID NO: 2402 - RNA, 17 nt, Homo sapiens
guucggaagcgcacgcu

SEQ ID NO: 2403 - RNA, 17 nt, Homo sapiens
ucggaagcgcacgcugc

SEQ ID NO: 2404 - RNA, 17 nt, Homo sapiens
aagcgcacgcugcggag

SEQ ID NO: 2405 - RNA, 17 nt, Homo sapiens
cgcacgcugcggaggcu

SEQ ID NO: 2406 - RNA, 17 nt, Homo sapiens
cugcggaggcugcugca

SEQ ID NO: 2407 - RNA, 17 nt, Homo sapiens
cggaggcugcugcagga

SEQ ID NO: 2408 - RNA, 17 nt, Homo sapiens
aggcugcugcaggagag

SEQ ID NO: 2409 - RNA, 17 nt, Homo sapiens
gagagggagcuugugga

SEQ ID NO: 2410 - RNA, 17 nt, Homo sapiens
gggagcuuguggagccu

SEQ ID NO: 2411 - RNA, 17 nt, Homo sapiens
cuuguggagccucuuac

SEQ ID NO: 2412 - RNA, 17 nt, Homo sapiens
uacacccaguggagaag

SEQ ID NO: 2413 - RNA, 17 nt, Homo sapiens
guggagaagcucccaac

SEQ ID NO: 2414 - RNA, 17 nt, Homo sapiens
ccaaccaagcucucuug

SEQ ID NO: 2415 - RNA, 17 nt, Homo sapiens
agaucaaagugcugggc

SEQ ID NO: 2416 - RNA, 17 nt, Homo sapiens
aucaaagugcugggcuc

SEQ ID NO: 2417 - RNA, 17 nt, Homo sapiens
agugcugggcuccggug

SEQ ID NO: 2418 - RNA, 17 nt, Homo sapiens
gggcuccggugcguucg

SEQ ID NO: 2419 - RNA, 17 nt, Homo sapiens
gcuccggugcguucggc

SEQ ID NO: 2420 - RNA, 17 nt, Homo sapiens
uccggugcguucggcac

SEQ ID NO: 2421 - RNA, 17 nt, Homo sapiens
ugcguucggcacggugu

SEQ ID NO: 2422 - RNA, 17 nt, Homo sapiens
ucggcacgguguauaag

SEQ ID NO: 2423 - RNA, 17 nt, Homo sapiens
ggcacgguguauaaggg

SEQ ID NO: 2424 - RNA, 17 nt, Homo sapiens
cccagaaggugagaaag

SEQ ID NO: 2425 - RNA, 17 nt, Homo sapiens
gugagaaaguuaaaauu

SEQ ID NO: 2426 - RNA, 17 nt, Homo sapiens
aaauucccgucgcuauc

SEQ ID NO: 2427 - RNA, 17 nt, Homo sapiens
uucccgucgcuaucaag

SEQ ID NO: 2428 - RNA, 17 nt, Homo sapiens
uaagagaagcaacaucu

SEQ ID NO: 2429 - RNA, 17 nt, Homo sapiens
cuccgaaagccaacaag

SEQ ID NO: 2430 - RNA, 17 nt, Homo sapiens
ucgaugaagccuacgug

SEQ ID NO: 2431 - RNA, 17 nt, Homo sapiens
aagccuacgugauggcc

SEQ ID NO: 2432 - RNA, 17 nt, Homo sapiens
acgugauggccagcgug

SEQ ID NO: 2433 - RNA, 17 nt, Homo sapiens
gauggccagcguggaca

SEQ ID NO: 2434 - RNA, 17 nt, Homo sapiens
uggccagcguggacaac

SEQ ID NO: 2435 - RNA, 17 nt, Homo sapiens
acccccacgugugccgc

SEQ ID NO: 2436 - RNA, 17 nt, Homo sapiens
ccccacgugugccgccu

SEQ ID NO: 2437 - RNA, 17 nt, Homo sapiens
ccacgugugccgccugc

SEQ ID NO: 2438 - RNA, 17 nt, Homo sapiens
cgugugccgccugcugg

SEQ ID NO: 2439 - RNA, 17 nt, Homo sapiens
ugccgccugcugggcau

SEQ ID NO: 2440 - RNA, 17 nt, Homo sapiens
ccugcugggcaucugcc

SEQ ID NO: 2441 - RNA, 17 nt, Homo sapiens
gggcaucugccucaccu

SEQ ID NO: 2442 - RNA, 17 nt, Homo sapiens
ccuccaccgugcaacuc

SEQ ID NO: 2443 - RNA, 17 nt, Homo sapiens
uccaccgugcaacucau

SEQ ID NO: 2444 - RNA, 17 nt, Homo sapiens
cucaucacgcagcucau

SEQ ID NO: 2445 - RNA, 17 nt, Homo sapiens
aucacgcagcucaugcc

SEQ ID NO: 2446 - RNA, 17 nt, Homo sapiens
cagcucaugcccuucgg

SEQ ID NO: 2447 - RNA, 17 nt, Homo sapiens
gcccuucggcugccucc

SEQ ID NO: 2448 - RNA, 17 nt, Homo sapiens
cuucggcugccuccugg

SEQ ID NO: 2449 - RNA, 17 nt, Homo sapiens
uggacuauguccgggaa

SEQ ID NO: 2450 - RNA, 17 nt, Homo sapiens
caauauuggcucccagu

SEQ ID NO: 2451 - RNA, 17 nt, Homo sapiens
ggcucccaguaccugcu

SEQ ID NO: 2452 - RNA, 17 nt, Homo sapiens
caguaccugcucaacug

SEQ ID NO: 2453 - RNA, 17 nt, Homo sapiens
cucaacuggugugugca

SEQ ID NO: 2454 - RNA, 17 nt, Homo sapiens
caacuggugugugcaga

SEQ ID NO: 2455 - RNA, 17 nt, Homo sapiens
acuggugugugcagauc

SEQ ID NO: 2456 - RNA, 17 nt, Homo sapiens
uggugugugcagaucgc

SEQ ID NO: 2457 - RNA, 17 nt, Homo sapiens
ugcagaucgcaaagggc

SEQ ID NO: 2458 - RNA, 17 nt, Homo sapiens
cgcaaagggcaugaacu

SEQ ID NO: 2459 - RNA, 17 nt, Homo sapiens
ggaggaccgucgcuugg

SEQ ID NO: 2460 - RNA, 17 nt, Homo sapiens
ggaccgucgcuuggugc

SEQ ID NO: 2461 - RNA, 17 nt, Homo sapiens
gucgcuuggugcaccgc

SEQ ID NO: 2462 - RNA, 17 nt, Homo sapiens
cgcuuggugcaccgcga

SEQ ID NO: 2463 - RNA, 17 nt, Homo sapiens
ggugcaccgcgaccugg

SEQ ID NO: 2464 - RNA, 17 nt, Homo sapiens
gcgaccuggcagccagg

SEQ ID NO: 2465 - RNA, 17 nt, Homo sapiens
accuggcagccaggaac

SEQ ID NO: 2466 - RNA, 17 nt, Homo sapiens
ccaggaacguacuggug

SEQ ID NO: 2467 - RNA, 17 nt, Homo sapiens
acguacuggugaaaaca

SEQ ID NO: 2468 - RNA, 17 nt, Homo sapiens
aaaacaccgcagcaugu

SEQ ID NO: 2469 - RNA, 17 nt, Homo sapiens
acaccgcagcaugucaa

SEQ ID NO: 2470 - RNA, 17 nt, Homo sapiens
cgcagcaugucaagauc

SEQ ID NO: 2471 - RNA, 17 nt, Homo sapiens
gauuuugggcuggccaa

SEQ ID NO: 2472 - RNA, 17 nt, Homo sapiens
uugggcuggccaaacug

SEQ ID NO: 2473 - RNA, 17 nt, Homo sapiens
gccaaacugcugggugc

SEQ ID NO: 2474 - RNA, 17 nt, Homo sapiens
acugcugggugcggaag

SEQ ID NO: 2475 - RNA, 17 nt, Homo sapiens
ugcugggugcggaagag

SEQ ID NO: 2476 - RNA, 17 nt, Homo sapiens
aauaccaugcagaagga

SEQ ID NO: 2477 - RNA, 17 nt, Homo sapiens
agaaggaggcaaagugc

SEQ ID NO: 2478 - RNA, 17 nt, Homo sapiens
gaggcaaagugccuauc

SEQ ID NO: 2479 - RNA, 17 nt, Homo sapiens
ggcaaagugccuaucaa

SEQ ID NO: 2480 - RNA, 17 nt, Homo sapiens
ccuaucaaguggauggc

SEQ ID NO: 2481 - RNA, 17 nt, Homo sapiens
aguggauggcauuggaa

SEQ ID NO: 2482 - RNA, 17 nt, Homo sapiens
ccaccagagugaugucu

SEQ ID NO: 2483 - RNA, 17 nt, Homo sapiens
agagugaugucuggagc

SEQ ID NO: 2484 - RNA, 17 nt, Homo sapiens
ugucuggagcuacgggg

SEQ ID NO: 2485 - RNA, 17 nt, Homo sapiens
gcuacggggugaccguu

SEQ ID NO: 2486 - RNA, 17 nt, Homo sapiens
gggugaccguuugggag

SEQ ID NO: 2487 - RNA, 17 nt, Homo sapiens
guuugggaguugaugac

SEQ ID NO: 2488 - RNA, 17 nt, Homo sapiens
ggauccaagccauauga

SEQ ID NO: 2489 - RNA, 17 nt, Homo sapiens
gaaucccugccagcgag

SEQ ID NO: 2490 - RNA, 17 nt, Homo sapiens
cccugccagcgagaucu

SEQ ID NO: 2491 - RNA, 17 nt, Homo sapiens
aggagaacgccucccuc

SEQ ID NO: 2492 - RNA, 17 nt, Homo sapiens
cucccucagccacccau

SEQ ID NO: 2493 - RNA, 17 nt, Homo sapiens
acccauauguaccaucg

SEQ ID NO: 2494 - RNA, 17 nt, Homo sapiens
ccaucgaugucuacaug

SEQ ID NO: 2495 - RNA, 17 nt, Homo sapiens
ugaucauggucaagugc

SEQ ID NO: 2496 - RNA, 17 nt, Homo sapiens
auggucaagugcuggau

SEQ ID NO: 2497 - RNA, 17 nt, Homo sapiens
ggucaagugcuggauga

SEQ ID NO: 2498 - RNA, 17 nt, Homo sapiens
ugauagacgcagauagu

SEQ ID NO: 2499 - RNA, 17 nt, Homo sapiens
cgcagauagucgcccaa

SEQ ID NO: 2500 - RNA, 17 nt, Homo sapiens
agauagucgcccaaagu

SEQ ID NO: 2501 - RNA, 17 nt, Homo sapiens
cgcccaaaguuccguga

SEQ ID NO: 2502 - RNA, 17 nt, Homo sapiens
aaaguuccgugaguuga

SEQ ID NO: 2503 - RNA, 17 nt, Homo sapiens
uuccgugaguugaucau

SEQ ID NO: 2504 - RNA, 17 nt, Homo sapiens
ccaaaauggcccgagac

SEQ ID NO: 2505 - RNA, 17 nt, Homo sapiens
gacccccagcgcuaccu

SEQ ID NO: 2506 - RNA, 17 nt, Homo sapiens
cccccagcgcuaccuug

SEQ ID NO: 2507 - RNA, 17 nt, Homo sapiens
gcuaccuugucauucag

SEQ ID NO: 2508 - RNA, 17 nt, Homo sapiens
gaaagaaugcauuugcc

SEQ ID NO: 2509 - RNA, 17 nt, Homo sapiens
augcauuugccaagucc

SEQ ID NO: 2510 - RNA, 17 nt, Homo sapiens
uuugccaaguccuacag

SEQ ID NO: 2511 - RNA, 17 nt, Homo sapiens
cuucuaccgugcccuga

SEQ ID NO: 2512 - RNA, 17 nt, Homo sapiens
ucuaccgugcccugaug

SEQ ID NO: 2513 - RNA, 17 nt, Homo sapiens
uggacgacgugguggau

SEQ ID NO: 2514 - RNA, 17 nt, Homo sapiens
acgacgugguggaugcc

SEQ ID NO: 2515 - RNA, 17 nt, Homo sapiens
ugguggaugccgacgag

SEQ ID NO: 2516 - RNA, 17 nt, Homo sapiens
gccgacgaguaccucau

SEQ ID NO: 2517 - RNA, 17 nt, Homo sapiens
aucccacagcagggcuu

SEQ ID NO: 2518 - RNA, 17 nt, Homo sapiens
acagcagggcuucuuca

SEQ ID NO: 2519 - RNA, 17 nt, Homo sapiens
cuucuucagcagccccu

SEQ ID NO: 2520 - RNA, 17 nt, Homo sapiens
cuucagcagccccucca

SEQ ID NO: 2521 - RNA, 17 nt, Homo sapiens
cccuccacgucacggac

SEQ ID NO: 2522 - RNA, 17 nt, Homo sapiens
ccuccugagcucucuga

SEQ ID NO: 2523 - RNA, 17 nt, Homo sapiens
cucucugagugcaacca

SEQ ID NO: 2524 - RNA, 17 nt, Homo sapiens
cucugagugcaaccagc

SEQ ID NO: 2525 - RNA, 17 nt, Homo sapiens
ugcaaccagcaacaauu

SEQ ID NO: 2526 - RNA, 17 nt, Homo sapiens
auuccaccguggcuugc

SEQ ID NO: 2527 - RNA, 17 nt, Homo sapiens
ccaccguggcuugcauu

SEQ ID NO: 2528 - RNA, 17 nt, Homo sapiens
cguggcuugcauugaua

SEQ ID NO: 2529 - RNA, 17 nt, Homo sapiens
agaaaugggcugcaaag

SEQ ID NO: 2530 - RNA, 17 nt, Homo sapiens
aaugggcugcaaagcug

SEQ ID NO: 2531 - RNA, 17 nt, Homo sapiens
gcugcaaagcuguccca

SEQ ID NO: 2532 - RNA, 17 nt, Homo sapiens
gcaaagcugucccauca

SEQ ID NO: 2533 - RNA, 17 nt, Homo sapiens
ggaagacagcuucuugc

SEQ ID NO: 2534 - RNA, 17 nt, Homo sapiens
agcuucuugcagcgaua

SEQ ID NO: 2535 - RNA, 17 nt, Homo sapiens
uucuugcagcgauacag

SEQ ID NO: 2536 - RNA, 17 nt, Homo sapiens
gcgauacagcucagacc

SEQ ID NO: 2537 - RNA, 17 nt, Homo sapiens
ccccacaggcgccuuga

SEQ ID NO: 2538 - RNA, 17 nt, Homo sapiens
ccacaggcgccuugacu

SEQ ID NO: 2539 - RNA, 17 nt, Homo sapiens
ugaggacagcauagacg

SEQ ID NO: 2540 - RNA, 17 nt, Homo sapiens
uccucccagugccugaa

SEQ ID NO: 2541 - RNA, 17 nt, Homo sapiens
cucccagugccugaaua

SEQ ID NO: 2542 - RNA, 17 nt, Homo sapiens
auaaaccaguccguucc

SEQ ID NO: 2543 - RNA, 17 nt, Homo sapiens
accaguccguucccaaa

SEQ ID NO: 2544 - RNA, 17 nt, Homo sapiens
cccaaaaggcccgcugg

SEQ ID NO: 2545 - RNA, 17 nt, Homo sapiens
aaaggcccgcuggcucu

SEQ ID NO: 2546 - RNA, 17 nt, Homo sapiens
gcccgcuggcucugugc

SEQ ID NO: 2547 - RNA, 17 nt, Homo sapiens
cuggcucugugcagaau

SEQ ID NO: 2548 - RNA, 17 nt, Homo sapiens
ggcucugugcagaaucc

SEQ ID NO: 2549 - RNA, 17 nt, Homo sapiens
agaauccugucuaucac

SEQ ID NO: 2550 - RNA, 17 nt, Homo sapiens
cacaaucagccucugaa

SEQ ID NO: 2551 - RNA, 17 nt, Homo sapiens
ugaaccccgcgcccagc

SEQ ID NO: 2552 - RNA, 17 nt, Homo sapiens
aaccccgcgcccagcag

SEQ ID NO: 2553 - RNA, 17 nt, Homo sapiens
cgcgcccagcagagacc

SEQ ID NO: 2554 - RNA, 17 nt, Homo sapiens
cccccacagcacugcag

SEQ ID NO: 2555 - RNA, 17 nt, Homo sapiens
acagcacugcagugggc

SEQ ID NO: 2556 - RNA, 17 nt, Homo sapiens
gcacugcagugggcaac

SEQ ID NO: 2557 - RNA, 17 nt, Homo sapiens
ugcagugggcaaccccg

SEQ ID NO: 2558 - RNA, 17 nt, Homo sapiens
aaccccgaguaucucaa

SEQ ID NO: 2559 - RNA, 17 nt, Homo sapiens
ucaacacuguccagccc

SEQ ID NO: 2560 - RNA, 17 nt, Homo sapiens
acuguccagcccaccug

SEQ ID NO: 2561 - RNA, 17 nt, Homo sapiens
gcccaccugugucaaca

SEQ ID NO: 2562 - RNA, 17 nt, Homo sapiens
ccaccugugucaacagc

SEQ ID NO: 2563 - RNA, 17 nt, Homo sapiens
ugucaacagcacauucg

SEQ ID NO: 2564 - RNA, 17 nt, Homo sapiens
auucgacagcccugccc

SEQ ID NO: 2565 - RNA, 17 nt, Homo sapiens
acagcccugcccacugg

SEQ ID NO: 2566 - RNA, 17 nt, Homo sapiens
cccacugggcccagaaa

SEQ ID NO: 2567 - RNA, 17 nt, Homo sapiens
ccagaaaggcagccacc

SEQ ID NO: 2568 - RNA, 17 nt, Homo sapiens
gaaaggcagccaccaaa

SEQ ID NO: 2569 - RNA, 17 nt, Homo sapiens
ccaaauuagccuggaca

SEQ ID NO: 2570 - RNA, 17 nt, Homo sapiens
gacuaccagcaggacuu

SEQ ID NO: 2571 - RNA, 17 nt, Homo sapiens
ccaaggaagccaagcca

SEQ ID NO: 2572 - RNA, 17 nt, Homo sapiens
gaagccaagccaaaugg

SEQ ID NO: 2573 - RNA, 17 nt, Homo sapiens
gccaaauggcaucuuua

SEQ ID NO: 2574 - RNA, 17 nt, Homo sapiens
cuuuaagggcuccacag

SEQ ID NO: 2575 - RNA, 17 nt, Homo sapiens
gcuccacagcugaaaau

SEQ ID NO: 2576 - RNA, 17 nt, Homo sapiens
cugaaaaugcagaauac

SEQ ID NO: 2577 - RNA, 17 nt, Homo sapiens
accuaagggucgcgcca

SEQ ID NO: 2578 - RNA, 17 nt, Homo sapiens
uaagggucgcgccacaa

SEQ ID NO: 2579 - RNA, 17 nt, Homo sapiens
agggucgcgccacaaag

SEQ ID NO: 2580 - RNA, 17 nt, Homo sapiens
gccacaaagcagugaau

SEQ ID NO: 2581 - RNA, 17 nt, Homo sapiens
acaaagcagugaauuua

SEQ ID NO: 2582 - RNA, 17 nt, Homo sapiens
uuauuggagcaugacca

SEQ ID NO: 2583 - RNA, 17 nt, Homo sapiens
ggaggauaguaugagcc

SEQ ID NO: 2584 - RNA, 17 nt, Homo sapiens
uaguaugagcccuaaaa

SEQ ID NO: 2585 - RNA, 17 nt, Homo sapiens
aggaccaagccacagca

SEQ ID NO: 2586 - RNA, 17 nt, Homo sapiens
aagccacagcagguccu

SEQ ID NO: 2587 - RNA, 17 nt, Homo sapiens
cacagcagguccuccau

SEQ ID NO: 2588 - RNA, 17 nt, Homo sapiens
ucccaacagccaugccc

SEQ ID NO: 2589 - RNA, 17 nt, Homo sapiens
acagccaugcccgcauu

SEQ ID NO: 2590 - RNA, 17 nt, Homo sapiens
ccaugcccgcauuagcu

SEQ ID NO: 2591 - RNA, 17 nt, Homo sapiens
ccgcauuagcucuuaga

SEQ ID NO: 2592 - RNA, 17 nt, Homo sapiens
acagacugguuuugcaa

SEQ ID NO: 2593 - RNA, 17 nt, Homo sapiens
cugguuuugcaacguuu

SEQ ID NO: 2594 - RNA, 17 nt, Homo sapiens
uuugcaacguuuacacc

SEQ ID NO: 2595 - RNA, 17 nt, Homo sapiens
accgacuagccaggaag

SEQ ID NO: 2596 - RNA, 17 nt, Homo sapiens
gccaggaaguacuucca

SEQ ID NO: 2597 - RNA, 17 nt, Homo sapiens
caccucgggcacauuuu

SEQ ID NO: 2598 - RNA, 17 nt, Homo sapiens
uuugggaaguugcauuc

SEQ ID NO: 2599 - RNA, 17 nt, Homo sapiens
gggaaguugcauuccuu

SEQ ID NO: 2600 - RNA, 17 nt, Homo sapiens
auuccuuugucuucaaa

SEQ ID NO: 2601 - RNA, 17 nt, Homo sapiens
uucaaacugugaagcau

SEQ ID NO: 2602 - RNA, 17 nt, Homo sapiens
acugugaagcauuuaca

SEQ ID NO: 2603 - RNA, 17 nt, Homo sapiens
acagaaacgcauccagc

SEQ ID NO: 2604 - RNA, 17 nt, Homo sapiens
cgcauccagcaagaaua

SEQ ID NO: 2605 - RNA, 17 nt, Homo sapiens
agaauauugucccuuug

SEQ ID NO: 2606 - RNA, 17 nt, Homo sapiens
cccuuugagcagaaauu

SEQ ID NO: 2607 - RNA, 17 nt, Homo sapiens
ucaaagagguauauuug

SEQ ID NO: 2608 - RNA, 17 nt, Homo sapiens
aaaaaaaaguauaugug

SEQ ID NO: 2609 - RNA, 17 nt, Homo sapiens
aaguauaugugaggauu

SEQ ID NO: 2610 - RNA, 17 nt, Homo sapiens
aucuuggaguuuuucau

SEQ ID NO: 2611 - RNA, 17 nt, Homo sapiens
uuuucauugucgcuauu

SEQ ID NO: 2612 - RNA, 17 nt, Homo sapiens
ucauugucgcuauugau

SEQ ID NO: 2613 - RNA, 17 nt, Homo sapiens
uucaaugggcucuucca

SEQ ID NO: 2614 - RNA, 17 nt, Homo sapiens
aggaagaagcuugcugg

SEQ ID NO: 2615 - RNA, 17 nt, Homo sapiens
agaagcuugcugguagc

SEQ ID NO: 2616 - RNA, 17 nt, Homo sapiens
gcuugcugguagcacuu

SEQ ID NO: 2617 - RNA, 17 nt, Homo sapiens
ugcugguagcacuugcu

SEQ ID NO: 2618 - RNA, 17 nt, Homo sapiens
uagcacuugcuacccug

SEQ ID NO: 2619 - RNA, 17 nt, Homo sapiens
uacccugaguucaucca

SEQ ID NO: 2620 - RNA, 17 nt, Homo sapiens
ucauccaggcccaacug

SEQ ID NO: 2621 - RNA, 17 nt, Homo sapiens
gcccaacugugagcaag

SEQ ID NO: 2622 - RNA, 17 nt, Homo sapiens
aacugugagcaaggagc

SEQ ID NO: 2623 - RNA, 17 nt, Homo sapiens
agcaaggagcacaagcc

SEQ ID NO: 2624 - RNA, 17 nt, Homo sapiens
gagcacaagccacaagu

SEQ ID NO: 2625 - RNA, 17 nt, Homo sapiens
agccacaagucuuccag

SEQ ID NO: 2626 - RNA, 17 nt, Homo sapiens
cagaggaugcuugauuc

SEQ ID NO: 2627 - RNA, 17 nt, Homo sapiens
ugauuccagugguucug

SEQ ID NO: 2628 - RNA, 17 nt, Homo sapiens
uuccagugguucugcuu

SEQ ID NO: 2629 - RNA, 17 nt, Homo sapiens
gugguucugcuucaagg

SEQ ID NO: 2630 - RNA, 17 nt, Homo sapiens
gcuucaaggcuuccacu

SEQ ID NO: 2631 - RNA, 17 nt, Homo sapiens
cuuccacugcaaaacac

SEQ ID NO: 2632 - RNA, 17 nt, Homo sapiens
ccaagaaggccuucaug

SEQ ID NO: 2633 - RNA, 17 nt, Homo sapiens
ccuucauggccccagca

SEQ ID NO: 2634 - RNA, 17 nt, Homo sapiens
uggccccagcaggccgg

SEQ ID NO: 2635 - RNA, 17 nt, Homo sapiens
cccagcaggccggaucg

SEQ ID NO: 2636 - RNA, 17 nt, Homo sapiens
ccggaucgguacuguau

SEQ ID NO: 2637 - RNA, 17 nt, Homo sapiens
ucgguacuguaucaagu

SEQ ID NO: 2638 - RNA, 17 nt, Homo sapiens
uguaucaagucauggca

SEQ ID NO: 2639 - RNA, 17 nt, Homo sapiens
aagucauggcagguaca

SEQ ID NO: 2640 - RNA, 17 nt, Homo sapiens
cauggcagguacaguag

SEQ ID NO: 2641 - RNA, 17 nt, Homo sapiens
cagguacaguaggauaa

SEQ ID NO: 2642 - RNA, 17 nt, Homo sapiens
uaggauaagccacucug

SEQ ID NO: 2643 - RNA, 17 nt, Homo sapiens
gccacucugucccuucc

SEQ ID NO: 2644 - RNA, 17 nt, Homo sapiens
cuuccugggcaaagaag

SEQ ID NO: 2645 - RNA, 17 nt, Homo sapiens
uuacuuuuguaaaaaug

SEQ ID NO: 2646 - RNA, 17 nt, Homo sapiens
guaaaaauguccccacg

SEQ ID NO: 2647 - RNA, 17 nt, Homo sapiens
uccccacgguacuuacu

SEQ ID NO: 2648 - RNA, 17 nt, Homo sapiens
auggaccagugguuucc

SEQ ID NO: 2649 - RNA, 17 nt, Homo sapiens
gaccagugguuuccagu

SEQ ID NO: 2650 - RNA, 17 nt, Homo sapiens
gguuuccagucaugagc

SEQ ID NO: 2651 - RNA, 17 nt, Homo sapiens
agucaugagcguuagac

SEQ ID NO: 2652 - RNA, 17 nt, Homo sapiens
ucaugagcguuagacug

SEQ ID NO: 2653 - RNA, 17 nt, Homo sapiens
acugacuuguuugucuu

SEQ ID NO: 2654 - RNA, 17 nt, Homo sapiens
acuuguuugucuuccau

SEQ ID NO: 2655 - RNA, 17 nt, Homo sapiens
auuccauuguuuugaaa

SEQ ID NO: 2656 - RNA, 17 nt, Homo sapiens
gaaacucaguaugccgc

SEQ ID NO: 2657 - RNA, 17 nt, Homo sapiens
cucaguaugccgccccu

SEQ ID NO: 2658 - RNA, 17 nt, Homo sapiens
aguaugccgccccuguc

SEQ ID NO: 2659 - RNA, 17 nt, Homo sapiens
ccgccccugucuugcug

SEQ ID NO: 2660 - RNA, 17 nt, Homo sapiens
ccugucuugcugucaug

SEQ ID NO: 2661 - RNA, 17 nt, Homo sapiens
gucuugcugucaugaaa

SEQ ID NO: 2662 - RNA, 17 nt, Homo sapiens
ugaaaucagcaagagag

SEQ ID NO: 2663 - RNA, 17 nt, Homo sapiens
ggauuccagcccacauu

SEQ ID NO: 2664 - RNA, 17 nt, Homo sapiens
auucaucagcauuugga

SEQ ID NO: 2665 - RNA, 17 nt, Homo sapiens
gaccaauagcccacagc

SEQ ID NO: 2666 - RNA, 17 nt, Homo sapiens
agcccacagcugagaau

SEQ ID NO: 2667 - RNA, 17 nt, Homo sapiens
cugagaauguggaauac

SEQ ID NO: 2668 - RNA, 17 nt, Homo sapiens
auaacaccgcuuuuguu

SEQ ID NO: 2669 - RNA, 17 nt, Homo sapiens
ccgcuuuuguucucgca

SEQ ID NO: 2670 - RNA, 17 nt, Homo sapiens
uuguucucgcaaaaacg

SEQ ID NO: 2671 - RNA, 17 nt, Homo sapiens
gcaaaaacguaucuccu

SEQ ID NO: 2672 - RNA, 17 nt, Homo sapiens
aauuugaggcucagaug

SEQ ID NO: 2673 - RNA, 17 nt, Homo sapiens
gaugaaaugcaucaggu

SEQ ID NO: 2674 - RNA, 17 nt, Homo sapiens
ugcaucagguccuuugg

SEQ ID NO: 2675 - RNA, 17 nt, Homo sapiens
ccuuuggggcauagauc

SEQ ID NO: 2676 - RNA, 17 nt, Homo sapiens
aaaaugaagcugcucug

SEQ ID NO: 2677 - RNA, 17 nt, Homo sapiens
augaagcugcucugaaa

SEQ ID NO: 2678 - RNA, 17 nt, Homo sapiens
cuccuuuagccaucacc

SEQ ID NO: 2679 - RNA, 17 nt, Homo sapiens
caaaauuaguuuguguu

SEQ ID NO: 2680 - RNA, 17 nt, Homo sapiens
auuaguuuguguuacuu

SEQ ID NO: 2681 - RNA, 17 nt, Homo sapiens
uaguuuguguuacuuau

SEQ ID NO: 2682 - RNA, 17 nt, Homo sapiens
ggaagauaguuuucucc

SEQ ID NO: 2683 - RNA, 17 nt, Homo sapiens
cuucaaaagcuuuuuac

SEQ ID NO: 2684 - RNA, 17 nt, Homo sapiens
cucaaagaguauauguu

SEQ ID NO: 2685 - RNA, 17 nt, Homo sapiens
gaguauauguucccucc

SEQ ID NO: 2686 - RNA, 17 nt, Homo sapiens
cccuccaggucagcugc

SEQ ID NO: 2687 - RNA, 17 nt, Homo sapiens
ccaggucagcugccccc

SEQ ID NO: 2688 - RNA, 17 nt, Homo sapiens
ggucagcugcccccaaa

SEQ ID NO: 2689 - RNA, 17 nt, Homo sapiens
cuccuuacgcuuuguca

SEQ ID NO: 2690 - RNA, 17 nt, Homo sapiens
uacgcuuugucacacaa

SEQ ID NO: 2691 - RNA, 17 nt, Homo sapiens
cacaaaaagugucucug

SEQ ID NO: 2692 - RNA, 17 nt, Homo sapiens
caaaaagugucucugcc

SEQ ID NO: 2693 - RNA, 17 nt, Homo sapiens
gugucucugccuugagu

SEQ ID NO: 2694 - RNA, 17 nt, Homo sapiens
ugccuugagucaucuau

SEQ ID NO: 2695 - RNA, 17 nt, Homo sapiens
cuauucaagcacuuaca

SEQ ID NO: 2696 - RNA, 17 nt, Homo sapiens
cacuuacagcucuggcc

SEQ ID NO: 2697 - RNA, 17 nt, Homo sapiens
cagcucuggccacaaca

SEQ ID NO: 2698 - RNA, 17 nt, Homo sapiens
acaacagggcauuuuac

SEQ ID NO: 2699 - RNA, 17 nt, Homo sapiens
uuuuacaggugcgaaug

SEQ ID NO: 2700 - RNA, 17 nt, Homo sapiens
uuacaggugcgaaugac

SEQ ID NO: 2701 - RNA, 17 nt, Homo sapiens
gaaugacaguagcauua

SEQ ID NO: 2702 - RNA, 17 nt, Homo sapiens
ugacaguagcauuauga

SEQ ID NO: 2703 - RNA, 17 nt, Homo sapiens
cauuaugaguaguguga

SEQ ID NO: 2704 - RNA, 17 nt, Homo sapiens
uaugaguagugugaauu

SEQ ID NO: 2705 - RNA, 17 nt, Homo sapiens
ugaguagugugaauuca

SEQ ID NO: 2706 - RNA, 17 nt, Homo sapiens
gaauucagguaguaaau

SEQ ID NO: 2707 - RNA, 17 nt, Homo sapiens
uucagguaguaaauaug

SEQ ID NO: 2708 - RNA, 17 nt, Homo sapiens
aaacuaggguuugaaau

SEQ ID NO: 2709 - RNA, 17 nt, Homo sapiens
uugauaaugcuuucaca

SEQ ID NO: 2710 - RNA, 17 nt, Homo sapiens
caacauuugcagauguu

SEQ ID NO: 2711 - RNA, 17 nt, Homo sapiens
uugcagauguuuuagaa

SEQ ID NO: 2712 - RNA, 17 nt, Homo sapiens
ggaaaaaaguuccuucc

SEQ ID NO: 2713 - RNA, 17 nt, Homo sapiens
aagauucagcuaguuag

SEQ ID NO: 2714 - RNA, 17 nt, Homo sapiens
uucagcuaguuaggagc

SEQ ID NO: 2715 - RNA, 17 nt, Homo sapiens
aguuaggagcccauuuu

SEQ ID NO: 2716 - RNA, 17 nt, Homo sapiens
ccuaaucugugugugcc

SEQ ID NO: 2717 - RNA, 17 nt, Homo sapiens
uaaucugugugugcccu

SEQ ID NO: 2718 - RNA, 17 nt, Homo sapiens
aucugugugugcccugu

SEQ ID NO: 2719 - RNA, 17 nt, Homo sapiens
cugugugugcccuguaa

SEQ ID NO: 2720 - RNA, 17 nt, Homo sapiens
ugugcccuguaaccuga

SEQ ID NO: 2721 - RNA, 17 nt, Homo sapiens
ccugacugguuaacagc

SEQ ID NO: 2722 - RNA, 17 nt, Homo sapiens
gguuaacagcaguccuu

SEQ ID NO: 2723 - RNA, 17 nt, Homo sapiens
uaacagcaguccuuugu

SEQ ID NO: 2724 - RNA, 17 nt, Homo sapiens
aguccuuuguaaacagu

SEQ ID NO: 2725 - RNA, 17 nt, Homo sapiens
uguaaacaguguuuuaa

SEQ ID NO: 2726 - RNA, 17 nt, Homo sapiens
uaaacaguguuuuaaac

SEQ ID NO: 2727 - RNA, 17 nt, Homo sapiens
cucuccuagucaauauc

SEQ ID NO: 2728 - RNA, 17 nt, Homo sapiens
aagaaaugguucagaaa

SEQ ID NO: 2729 - RNA, 17 nt, Homo sapiens
uauuuucagccuacagu

SEQ ID NO: 2730 - RNA, 17 nt, Homo sapiens
agccuacaguuauguuc

SEQ ID NO: 2731 - RNA, 17 nt, Homo sapiens
acaguuauguucaguca

SEQ ID NO: 2732 - RNA, 17 nt, Homo sapiens
uauguucagucacacac

SEQ ID NO: 2733 - RNA, 17 nt, Homo sapiens
uacaaaauguuccuuuu

SEQ ID NO: 2734 - RNA, 17 nt, Homo sapiens
uuccuuuugcuuuuaaa

SEQ ID NO: 2735 - RNA, 17 nt, Homo sapiens
cuuuuaaaguaauuuuu

SEQ ID NO: 2736 - RNA, 17 nt, Homo sapiens
ccagaucagucagagcc

SEQ ID NO: 2737 - RNA, 17 nt, Homo sapiens
cagucagagccccuaca

SEQ ID NO: 2738 - RNA, 17 nt, Homo sapiens
ccccuacagcauuguua

SEQ ID NO: 2739 - RNA, 17 nt, Homo sapiens
acagcauuguuaagaaa

SEQ ID NO: 2740 - RNA, 17 nt, Homo sapiens
uuaagaaaguauuugau

SEQ ID NO: 2741 - RNA, 17 nt, Homo sapiens
ugauuuuugucucaaug

SEQ ID NO: 2742 - RNA, 17 nt, Homo sapiens
ccgcccagaccggacga

SEQ ID NO: 2743 - RNA, 17 nt, Homo sapiens
cagaccggacgacaggc

SEQ ID NO: 2744 - RNA, 17 nt, Homo sapiens
accggacgacaggccac

SEQ ID NO: 2745 - RNA, 17 nt, Homo sapiens
cgccgccaacgccacaa

SEQ ID NO: 2746 - RNA, 17 nt, Homo sapiens
acgccacaaccaccgcg

SEQ ID NO: 2747 - RNA, 17 nt, Homo sapiens
gcccccugacuccgucc

SEQ ID NO: 2748 - RNA, 17 nt, Homo sapiens
caguauugaucgggaga

SEQ ID NO: 2749 - RNA, 17 nt, Homo sapiens
gagcagcgaugcgaccc

SEQ ID NO: 2750 - RNA, 17 nt, Homo sapiens
gcgaugcgacccuccgg

SEQ ID NO: 2751 - RNA, 17 nt, Homo sapiens
ccuccgggacggccggg

SEQ ID NO: 2752 - RNA, 17 nt, Homo sapiens
cacgaguaacaagcuca

SEQ ID NO: 2753 - RNA, 17 nt, Homo sapiens
uuuugaagaucauuuuc

SEQ ID NO: 2754 - RNA, 17 nt, Homo sapiens
uccagaggauguucaau

SEQ ID NO: 2755 - RNA, 17 nt, Homo sapiens
gauguucaauaacugug

SEQ ID NO: 2756 - RNA, 17 nt, Homo sapiens
guucaauaacugugagg

SEQ ID NO: 2757 - RNA, 17 nt, Homo sapiens
ccuugggaauuuggaaa

SEQ ID NO: 2758 - RNA, 17 nt, Homo sapiens
auuuggaaauuaccuau

SEQ ID NO: 2759 - RNA, 17 nt, Homo sapiens
gcagaggaauuaugauc

SEQ ID NO: 2760 - RNA, 17 nt, Homo sapiens
gaauuaugaucuuuccu

SEQ ID NO: 2761 - RNA, 17 nt, Homo sapiens
ucuuaaagaccauccag

SEQ ID NO: 2762 - RNA, 17 nt, Homo sapiens
ugcccucaacacagugg

SEQ ID NO: 2763 - RNA, 17 nt, Homo sapiens
uggagcgaauuccuuug

SEQ ID NO: 2764 - RNA, 17 nt, Homo sapiens
uuuggaaaaccugcaga

SEQ ID NO: 2765 - RNA, 17 nt, Homo sapiens
accugcagaucaucaga

SEQ ID NO: 2766 - RNA, 17 nt, Homo sapiens
cagaggaaauauguacu

SEQ ID NO: 2767 - RNA, 17 nt, Homo sapiens
cuacgaaaauuccuaug

SEQ ID NO: 2768 - RNA, 17 nt, Homo sapiens
cuuaucuaacuaugaug

SEQ ID NO: 2769 - RNA, 17 nt, Homo sapiens
uaacuaugaugcaaaua

SEQ ID NO: 2770 - RNA, 17 nt, Homo sapiens
ugaugcaaauaaaaccg

SEQ ID NO: 2771 - RNA, 17 nt, Homo sapiens
caaauaaaaccggacug

SEQ ID NO: 2772 - RNA, 17 nt, Homo sapiens
aaaaccggacugaagga

SEQ ID NO: 2773 - RNA, 17 nt, Homo sapiens
caugagaaauuuacagg

SEQ ID NO: 2774 - RNA, 17 nt, Homo sapiens
uacaggaaauccugcau

SEQ ID NO: 2775 - RNA, 17 nt, Homo sapiens
guucagcaacaacccug

SEQ ID NO: 2776 - RNA, 17 nt, Homo sapiens
cagcaacaacccugccc

SEQ ID NO: 2777 - RNA, 17 nt, Homo sapiens
ccugugcaacguggaga

SEQ ID NO: 2778 - RNA, 17 nt, Homo sapiens
guggcgggacauaguca

SEQ ID NO: 2779 - RNA, 17 nt, Homo sapiens
cagcagugacuuucuca

SEQ ID NO: 2780 - RNA, 17 nt, Homo sapiens
ucucagcaacaugucga

SEQ ID NO: 2781 - RNA, 17 nt, Homo sapiens
acaugucgauggacuuc

SEQ ID NO: 2782 - RNA, 17 nt, Homo sapiens
gucgauggacuuccaga

SEQ ID NO: 2783 - RNA, 17 nt, Homo sapiens
cuuccagaaccaccugg

SEQ ID NO: 2784 - RNA, 17 nt, Homo sapiens
aaagugugauccaagcu

SEQ ID NO: 2785 - RNA, 17 nt, Homo sapiens
cugucccaaugggagcu

SEQ ID NO: 2786 - RNA, 17 nt, Homo sapiens
agaggagaacugccaga

SEQ ID NO: 2787 - RNA, 17 nt, Homo sapiens
ugccagaaacugaccaa

SEQ ID NO: 2788 - RNA, 17 nt, Homo sapiens
agaaacugaccaaaauc

SEQ ID NO: 2789 - RNA, 17 nt, Homo sapiens
ugaccaaaaucaucugu

SEQ ID NO: 2790 - RNA, 17 nt, Homo sapiens
ccccagugacugcugcc

SEQ ID NO: 2791 - RNA, 17 nt, Homo sapiens
cugccacaaccagugug

SEQ ID NO: 2792 - RNA, 17 nt, Homo sapiens
ggagagcgacugccugg

SEQ ID NO: 2793 - RNA, 17 nt, Homo sapiens
ugccgcaaauuccgaga

SEQ ID NO: 2794 - RNA, 17 nt, Homo sapiens
auuccgagacgaagcca

SEQ ID NO: 2795 - RNA, 17 nt, Homo sapiens
gugcaaggacaccugcc

SEQ ID NO: 2796 - RNA, 17 nt, Homo sapiens
gcucuacaaccccacca

SEQ ID NO: 2797 - RNA, 17 nt, Homo sapiens
cguaccagauggaugug

SEQ ID NO: 2798 - RNA, 17 nt, Homo sapiens
ccagauggaugugaacc

SEQ ID NO: 2799 - RNA, 17 nt, Homo sapiens
ggaugugaaccccgagg

SEQ ID NO: 2800 - RNA, 17 nt, Homo sapiens
gagggcaaauacagcuu

SEQ ID NO: 2801 - RNA, 17 nt, Homo sapiens
uccccguaauuaugugg

SEQ ID NO: 2802 - RNA, 17 nt, Homo sapiens
auguggugacagaucac

SEQ ID NO: 2803 - RNA, 17 nt, Homo sapiens
ggugacagaucacggcu

SEQ ID NO: 2804 - RNA, 17 nt, Homo sapiens
uggggccgacagcuaug

SEQ ID NO: 2805 - RNA, 17 nt, Homo sapiens
gcuaugagauggaggaa

SEQ ID NO: 2806 - RNA, 17 nt, Homo sapiens
ggaggaagacggcgucc

SEQ ID NO: 2807 - RNA, 17 nt, Homo sapiens
aguguguaacggaauag

SEQ ID NO: 2808 - RNA, 17 nt, Homo sapiens
guaacggaauagguauu

SEQ ID NO: 2809 - RNA, 17 nt, Homo sapiens
auuggugaauuuaaaga

SEQ ID NO: 2810 - RNA, 17 nt, Homo sapiens
auuuaaagacucacucu

SEQ ID NO: 2811 - RNA, 17 nt, Homo sapiens
cuccauaaaugcuacga

SEQ ID NO: 2812 - RNA, 17 nt, Homo sapiens
ugcuacgaauauuaaac

SEQ ID NO: 2813 - RNA, 17 nt, Homo sapiens
aauauuaaacacuucaa

SEQ ID NO: 2814 - RNA, 17 nt, Homo sapiens
cuucaaaaacugcaccu

SEQ ID NO: 2815 - RNA, 17 nt, Homo sapiens
caguggcgaucuccaca

SEQ ID NO: 2816 - RNA, 17 nt, Homo sapiens
uaggggugacuccuuca

SEQ ID NO: 2817 - RNA, 17 nt, Homo sapiens
uccucuggauccacagg

SEQ ID NO: 2818 - RNA, 17 nt, Homo sapiens
ccacaggaacuggauau

SEQ ID NO: 2819 - RNA, 17 nt, Homo sapiens
ggaacuggauauucuga

SEQ ID NO: 2820 - RNA, 17 nt, Homo sapiens
uucugaaaaccguaaag

SEQ ID NO: 2821 - RNA, 17 nt, Homo sapiens
uaaaggaaaucacaggg

SEQ ID NO: 2822 - RNA, 17 nt, Homo sapiens
uuuugcugauucaggcu

SEQ ID NO: 2823 - RNA, 17 nt, Homo sapiens
gccugaaaacaggacgg

SEQ ID NO: 2824 - RNA, 17 nt, Homo sapiens
aaaacaggacggaccuc

SEQ ID NO: 2825 - RNA, 17 nt, Homo sapiens
caggacggaccuccaug

SEQ ID NO: 2826 - RNA, 17 nt, Homo sapiens
cuuugagaaccuagaaa

SEQ ID NO: 2827 - RNA, 17 nt, Homo sapiens
accuagaaaucauacgc

SEQ ID NO: 2828 - RNA, 17 nt, Homo sapiens
gcggcaggaccaagcaa

SEQ ID NO: 2829 - RNA, 17 nt, Homo sapiens
accaagcaacaugguca

SEQ ID NO: 2830 - RNA, 17 nt, Homo sapiens
cagccugaacauaacau

SEQ ID NO: 2831 - RNA, 17 nt, Homo sapiens
ugaacauaacauccuug

SEQ ID NO: 2832 - RNA, 17 nt, Homo sapiens
uccuugggauuacgcuc

SEQ ID NO: 2833 - RNA, 17 nt, Homo sapiens
ucaaggagauaagugau

SEQ ID NO: 2834 - RNA, 17 nt, Homo sapiens
gauaagugauggagaug

SEQ ID NO: 2835 - RNA, 17 nt, Homo sapiens
ugauggagaugugauaa

SEQ ID NO: 2836 - RNA, 17 nt, Homo sapiens
gagaugugauaauuuca

SEQ ID NO: 2837 - RNA, 17 nt, Homo sapiens
augugauaauuucagga

SEQ ID NO: 2838 - RNA, 17 nt, Homo sapiens
uucaggaaacaaaaauu

SEQ ID NO: 2839 - RNA, 17 nt, Homo sapiens
aaacaaaaauuugugcu

SEQ ID NO: 2840 - RNA, 17 nt, Homo sapiens
cuaugcaaauacaauaa

SEQ ID NO: 2841 - RNA, 17 nt, Homo sapiens
caaauacaauaaacugg

SEQ ID NO: 2842 - RNA, 17 nt, Homo sapiens
uacaauaaacuggaaaa

SEQ ID NO: 2843 - RNA, 17 nt, Homo sapiens
uggaaaaaacuguuugg

SEQ ID NO: 2844 - RNA, 17 nt, Homo sapiens
uguuugggaccuccggu

SEQ ID NO: 2845 - RNA, 17 nt, Homo sapiens
gucagaaaaccaaaauu

SEQ ID NO: 2846 - RNA, 17 nt, Homo sapiens
aaaccaaaauuauaagc

SEQ ID NO: 2847 - RNA, 17 nt, Homo sapiens
uauaagcaacagaggug

SEQ ID NO: 2848 - RNA, 17 nt, Homo sapiens
aggugaaaacagcugca

SEQ ID NO: 2849 - RNA, 17 nt, Homo sapiens
gcccagggacugcgucu

SEQ ID NO: 2850 - RNA, 17 nt, Homo sapiens
uugccggaaugucagcc

SEQ ID NO: 2851 - RNA, 17 nt, Homo sapiens
ggcagggaaugcgugga

SEQ ID NO: 2852 - RNA, 17 nt, Homo sapiens
augcguggacaagugca

SEQ ID NO: 2853 - RNA, 17 nt, Homo sapiens
uguggagaacucugagu

SEQ ID NO: 2854 - RNA, 17 nt, Homo sapiens
ggccaugaacaucaccu

SEQ ID NO: 2855 - RNA, 17 nt, Homo sapiens
ugcacaggacggggacc

SEQ ID NO: 2856 - RNA, 17 nt, Homo sapiens
ggacggggaccagacaa

SEQ ID NO: 2857 - RNA, 17 nt, Homo sapiens
gggaccagacaacugua

SEQ ID NO: 2858 - RNA, 17 nt, Homo sapiens
accagacaacuguaucc

SEQ ID NO: 2859 - RNA, 17 nt, Homo sapiens
cuacauugacggccccc

SEQ ID NO: 2860 - RNA, 17 nt, Homo sapiens
gcgucaagaccugcccg

SEQ ID NO: 2861 - RNA, 17 nt, Homo sapiens
gggagaaaacaacaccc

SEQ ID NO: 2862 - RNA, 17 nt, Homo sapiens
agaaaacaacacccugg

SEQ ID NO: 2863 - RNA, 17 nt, Homo sapiens
guacgcagacgccggcc

SEQ ID NO: 2864 - RNA, 17 nt, Homo sapiens
ccauccaaacugcaccu

SEQ ID NO: 2865 - RNA, 17 nt, Homo sapiens
accuacggaugcacugg

SEQ ID NO: 2866 - RNA, 17 nt, Homo sapiens
gcuguccaacgaauggg

SEQ ID NO: 2867 - RNA, 17 nt, Homo sapiens
uccaacgaaugggccua

SEQ ID NO: 2868 - RNA, 17 nt, Homo sapiens
ggccuaagaucccgucc

SEQ ID NO: 2869 - RNA, 17 nt, Homo sapiens
ccacugggauggugggg

SEQ ID NO: 2870 - RNA, 17 nt, Homo sapiens
cccuggggaucggccuc

SEQ ID NO: 2871 - RNA, 17 nt, Homo sapiens
agcucccaaccaagcuc

SEQ ID NO: 2872 - RNA, 17 nt, Homo sapiens
ucuugaggaucuugaag

SEQ ID NO: 2873 - RNA, 17 nt, Homo sapiens
ugaaggaaacugaauuc

SEQ ID NO: 2874 - RNA, 17 nt, Homo sapiens
gaaacugaauucaaaaa

SEQ ID NO: 2875 - RNA, 17 nt, Homo sapiens
ucaaaaagaucaaagug

SEQ ID NO: 2876 - RNA, 17 nt, Homo sapiens
uauaagggacucuggau

SEQ ID NO: 2877 - RNA, 17 nt, Homo sapiens
gacucuggaucccagaa

SEQ ID NO: 2878 - RNA, 17 nt, Homo sapiens
aaguuaaaauucccguc

SEQ ID NO: 2879 - RNA, 17 nt, Homo sapiens
aucaaggaauuaagaga

SEQ ID NO: 2880 - RNA, 17 nt, Homo sapiens
gagaagcaacaucuccg

SEQ ID NO: 2881 - RNA, 17 nt, Homo sapiens
gaaagccaacaaggaaa

SEQ ID NO: 2882 - RNA, 17 nt, Homo sapiens
acaaggaaauccucgau

SEQ ID NO: 2883 - RNA, 17 nt, Homo sapiens
aauccucgaugaagccu

SEQ ID NO: 2884 - RNA, 17 nt, Homo sapiens
ccuacgugauggccagc

SEQ ID NO: 2885 - RNA, 17 nt, Homo sapiens
cagcguggacaaccccc

SEQ ID NO: 2886 - RNA, 17 nt, Homo sapiens
cguggacaacccccacg

SEQ ID NO: 2887 - RNA, 17 nt, Homo sapiens
accgugcaacucaucac

SEQ ID NO: 2888 - RNA, 17 nt, Homo sapiens
ccuccuggacuaugucc

SEQ ID NO: 2889 - RNA, 17 nt, Homo sapiens
guccgggaacacaaaga

SEQ ID NO: 2890 - RNA, 17 nt, Homo sapiens
acacaaagacaauauug

SEQ ID NO: 2891 - RNA, 17 nt, Homo sapiens
caaagacaauauuggcu

SEQ ID NO: 2892 - RNA, 17 nt, Homo sapiens
ccugcucaacuggugug

SEQ ID NO: 2893 - RNA, 17 nt, Homo sapiens
gugugcagaucgcaaag

SEQ ID NO: 2894 - RNA, 17 nt, Homo sapiens
gggcaugaacuacuugg

SEQ ID NO: 2895 - RNA, 17 nt, Homo sapiens
cuuggaggaccgucgcu

SEQ ID NO: 2896 - RNA, 17 nt, Homo sapiens
gcaccgcgaccuggcag

SEQ ID NO: 2897 - RNA, 17 nt, Homo sapiens
agccaggaacguacugg

SEQ ID NO: 2898 - RNA, 17 nt, Homo sapiens
uggugaaaacaccgcag

SEQ ID NO: 2899 - RNA, 17 nt, Homo sapiens
augucaagaucacagau

SEQ ID NO: 2900 - RNA, 17 nt, Homo sapiens
gaucacagauuuugggc

SEQ ID NO: 2901 - RNA, 17 nt, Homo sapiens
cuggccaaacugcuggg

SEQ ID NO: 2902 - RNA, 17 nt, Homo sapiens
gagaaagaauaccaugc

SEQ ID NO: 2903 - RNA, 17 nt, Homo sapiens
ucaaguggauggcauug

SEQ ID NO: 2904 - RNA, 17 nt, Homo sapiens
gcauuggaaucaauuuu

SEQ ID NO: 2905 - RNA, 17 nt, Homo sapiens
uggaaucaauuuuacac

SEQ ID NO: 2906 - RNA, 17 nt, Homo sapiens
uacacagaaucuauacc

SEQ ID NO: 2907 - RNA, 17 nt, Homo sapiens
ccagagugaugucugga

SEQ ID NO: 2908 - RNA, 17 nt, Homo sapiens
acggggugaccguuugg

SEQ ID NO: 2909 - RNA, 17 nt, Homo sapiens
gggaguugaugaccuuu

SEQ ID NO: 2910 - RNA, 17 nt, Homo sapiens
aguugaugaccuuugga

SEQ ID NO: 2911 - RNA, 17 nt, Homo sapiens
accuuuggauccaagcc

SEQ ID NO: 2912 - RNA, 17 nt, Homo sapiens
gccauaugacggaaucc

SEQ ID NO: 2913 - RNA, 17 nt, Homo sapiens
augacggaaucccugcc

SEQ ID NO: 2914 - RNA, 17 nt, Homo sapiens
ccagcgagaucuccucc

SEQ ID NO: 2915 - RNA, 17 nt, Homo sapiens
aaaggagaacgccuccc

SEQ ID NO: 2916 - RNA, 17 nt, Homo sapiens
uaccaucgaugucuaca

SEQ ID NO: 2917 - RNA, 17 nt, Homo sapiens
ucuacaugaucaugguc

SEQ ID NO: 2918 - RNA, 17 nt, Homo sapiens
agugcuggaugauagac

SEQ ID NO: 2919 - RNA, 17 nt, Homo sapiens
gcuggaugauagacgca

SEQ ID NO: 2920 - RNA, 17 nt, Homo sapiens
gaugauagacgcagaua

SEQ ID NO: 2921 - RNA, 17 nt, Homo sapiens
agacgcagauagucgcc

SEQ ID NO: 2922 - RNA, 17 nt, Homo sapiens
gugaguugaucaucgaa

SEQ ID NO: 2923 - RNA, 17 nt, Homo sapiens
aucaucgaauucuccaa

SEQ ID NO: 2924 - RNA, 17 nt, Homo sapiens
ucuccaaaauggcccga

SEQ ID NO: 2925 - RNA, 17 nt, Homo sapiens
ggcccgagacccccagc

SEQ ID NO: 2926 - RNA, 17 nt, Homo sapiens
ucagggggaugaaagaa

SEQ ID NO: 2927 - RNA, 17 nt, Homo sapiens
augaaagaaugcauuug

SEQ ID NO: 2928 - RNA, 17 nt, Homo sapiens
uccuacagacuccaacu

SEQ ID NO: 2929 - RNA, 17 nt, Homo sapiens
agacuccaacuucuacc

SEQ ID NO: 2930 - RNA, 17 nt, Homo sapiens
gugcccugauggaugaa

SEQ ID NO: 2931 - RNA, 17 nt, Homo sapiens
ccugauggaugaagaag

SEQ ID NO: 2932 - RNA, 17 nt, Homo sapiens
ugaagaagacauggacg

SEQ ID NO: 2933 - RNA, 17 nt, Homo sapiens
agacauggacgacgugg

SEQ ID NO: 2934 - RNA, 17 nt, Homo sapiens
cauggacgacguggugg

SEQ ID NO: 2935 - RNA, 17 nt, Homo sapiens
cgugguggaugccgacg

SEQ ID NO: 2936 - RNA, 17 nt, Homo sapiens
ggaugccgacgaguacc

SEQ ID NO: 2937 - RNA, 17 nt, Homo sapiens
cgucacggacuccccuc

SEQ ID NO: 2938 - RNA, 17 nt, Homo sapiens
ugagugcaaccagcaac

SEQ ID NO: 2939 - RNA, 17 nt, Homo sapiens
aaccagcaacaauucca

SEQ ID NO: 2940 - RNA, 17 nt, Homo sapiens
cagcaacaauuccaccg

SEQ ID NO: 2941 - RNA, 17 nt, Homo sapiens
uugcauugauagaaaug

SEQ ID NO: 2942 - RNA, 17 nt, Homo sapiens
ugauagaaaugggcugc

SEQ ID NO: 2943 - RNA, 17 nt, Homo sapiens
caaggaagacagcuucu

SEQ ID NO: 2944 - RNA, 17 nt, Homo sapiens
uugcagcgauacagcuc

SEQ ID NO: 2945 - RNA, 17 nt, Homo sapiens
cagcucagaccccacag

SEQ ID NO: 2946 - RNA, 17 nt, Homo sapiens
gcgccuugacugaggac

SEQ ID NO: 2947 - RNA, 17 nt, Homo sapiens
gacugaggacagcauag

SEQ ID NO: 2948 - RNA, 17 nt, Homo sapiens
cagcauagacgacaccu

SEQ ID NO: 2949 - RNA, 17 nt, Homo sapiens
cauagacgacaccuucc

SEQ ID NO: 2950 - RNA, 17 nt, Homo sapiens
gugccugaauacauaaa

SEQ ID NO: 2951 - RNA, 17 nt, Homo sapiens
auacauaaaccaguccg

SEQ ID NO: 2952 - RNA, 17 nt, Homo sapiens
ugugcagaauccugucu

SEQ ID NO: 2953 - RNA, 17 nt, Homo sapiens
cuaucacaaucagccuc

SEQ ID NO: 2954 - RNA, 17 nt, Homo sapiens
gccucugaaccccgcgc

SEQ ID NO: 2955 - RNA, 17 nt, Homo sapiens
cagcagagacccacacu

SEQ ID NO: 2956 - RNA, 17 nt, Homo sapiens
cuaccaggacccccaca

SEQ ID NO: 2957 - RNA, 17 nt, Homo sapiens
agugggcaaccccgagu

SEQ ID NO: 2958 - RNA, 17 nt, Homo sapiens
guaucucaacacugucc

SEQ ID NO: 2959 - RNA, 17 nt, Homo sapiens
cugugucaacagcacau

SEQ ID NO: 2960 - RNA, 17 nt, Homo sapiens
cacauucgacagcccug

SEQ ID NO: 2961 - RNA, 17 nt, Homo sapiens
gccaccaaauuagccug

SEQ ID NO: 2962 - RNA, 17 nt, Homo sapiens
uagccuggacaacccug

SEQ ID NO: 2963 - RNA, 17 nt, Homo sapiens
ccuggacaacccugacu

SEQ ID NO: 2964 - RNA, 17 nt, Homo sapiens
caacccugacuaccagc

SEQ ID NO: 2965 - RNA, 17 nt, Homo sapiens
ccagcaggacuucuuuc

SEQ ID NO: 2966 - RNA, 17 nt, Homo sapiens
caagccaaauggcaucu

SEQ ID NO: 2967 - RNA, 17 nt, Homo sapiens
agcugaaaaugcagaau

SEQ ID NO: 2968 - RNA, 17 nt, Homo sapiens
aaugcagaauaccuaag

SEQ ID NO: 2969 - RNA, 17 nt, Homo sapiens
agcagugaauuuauugg

SEQ ID NO: 2970 - RNA, 17 nt, Homo sapiens
ggagcaugaccacggag

SEQ ID NO: 2971 - RNA, 17 nt, Homo sapiens
cacggaggauaguauga

SEQ ID NO: 2972 - RNA, 17 nt, Homo sapiens
cccuaaaaauccagacu

SEQ ID NO: 2973 - RNA, 17 nt, Homo sapiens
aaauccagacucuuucg

SEQ ID NO: 2974 - RNA, 17 nt, Homo sapiens
cucuuucgauacccagg

SEQ ID NO: 2975 - RNA, 17 nt, Homo sapiens
uacccaggaccaagcca

SEQ ID NO: 2976 - RNA, 17 nt, Homo sapiens
ccaucccaacagccaug

SEQ ID NO: 2977 - RNA, 17 nt, Homo sapiens
gcucuuagacccacaga

SEQ ID NO: 2978 - RNA, 17 nt, Homo sapiens
acccacagacugguuuu

SEQ ID NO: 2979 - RNA, 17 nt, Homo sapiens
guuuugcaacguuuaca

SEQ ID NO: 2980 - RNA, 17 nt, Homo sapiens
uuacaccgacuagccag

SEQ ID NO: 2981 - RNA, 17 nt, Homo sapiens
gucuucaaacugugaag

SEQ ID NO: 2982 - RNA, 17 nt, Homo sapiens
uuacagaaacgcaucca

SEQ ID NO: 2983 - RNA, 17 nt, Homo sapiens
cagcaagaauauugucc

SEQ ID NO: 2984 - RNA, 17 nt, Homo sapiens
gagcagaaauuuaucuu

SEQ ID NO: 2985 - RNA, 17 nt, Homo sapiens
augugaggauuuuuauu

SEQ ID NO: 2986 - RNA, 17 nt, Homo sapiens
uuuuauugauuggggau

SEQ ID NO: 2987 - RNA, 17 nt, Homo sapiens
gauuggggaucuuggag

SEQ ID NO: 2988 - RNA, 17 nt, Homo sapiens
cgcuauugauuuuuacu

SEQ ID NO: 2989 - RNA, 17 nt, Homo sapiens
uuacuucaaugggcucu

SEQ ID NO: 2990 - RNA, 17 nt, Homo sapiens
cucuuccaacaaggaag

SEQ ID NO: 2991 - RNA, 17 nt, Homo sapiens
caggcccaacugugagc

SEQ ID NO: 2992 - RNA, 17 nt, Homo sapiens
uccagaggaugcuugau

SEQ ID NO: 2993 - RNA, 17 nt, Homo sapiens
gaugcuugauuccagug

SEQ ID NO: 2994 - RNA, 17 nt, Homo sapiens
acugcaaaacacuaaag

SEQ ID NO: 2995 - RNA, 17 nt, Homo sapiens
cacuaaagauccaagaa

SEQ ID NO: 2996 - RNA, 17 nt, Homo sapiens
caggccggaucgguacu

SEQ ID NO: 2997 - RNA, 17 nt, Homo sapiens
acaguaggauaagccac

SEQ ID NO: 2998 - RNA, 17 nt, Homo sapiens
aagaagaaacggagggg

SEQ ID NO: 2999 - RNA, 17 nt, Homo sapiens
cggaggggaugaauucu

SEQ ID NO: 3000 - RNA, 17 nt, Homo sapiens
ggggaugaauucuuccu

SEQ ID NO: 3001 - RNA, 17 nt, Homo sapiens
uuccuuagacuuacuuu

SEQ ID NO: 3002 - RNA, 17 nt, Homo sapiens
uuguaaaaaugucccca

SEQ ID NO: 3003 - RNA, 17 nt, Homo sapiens
ccccacugauggaccag

SEQ ID NO: 3004 - RNA, 17 nt, Homo sapiens
acugauggaccaguggu

SEQ ID NO: 3005 - RNA, 17 nt, Homo sapiens
agcguuagacugacuug

SEQ ID NO: 3006 - RNA, 17 nt, Homo sapiens
uuagacugacuuguuug

SEQ ID NO: 3007 - RNA, 17 nt, Homo sapiens
guuuugaaacucaguau

SEQ ID NO: 3008 - RNA, 17 nt, Homo sapiens
gucaugaaaucagcaag

SEQ ID NO: 3009 - RNA, 17 nt, Homo sapiens
aagagaggaugacacau

SEQ ID NO: 3010 - RNA, 17 nt, Homo sapiens
agaggaugacacaucaa

SEQ ID NO: 3011 - RNA, 17 nt, Homo sapiens
cacaucaaauaauaacu

SEQ ID NO: 3012 - RNA, 17 nt, Homo sapiens
aucaaauaauaacucgg

SEQ ID NO: 3013 - RNA, 17 nt, Homo sapiens
aaauaauaacucggauu

SEQ ID NO: 3014 - RNA, 17 nt, Homo sapiens
uaacucggauuccagcc

SEQ ID NO: 3015 - RNA, 17 nt, Homo sapiens
cacauuggauucaucag

SEQ ID NO: 3016 - RNA, 17 nt, Homo sapiens
gcauuuggaccaauagc

SEQ ID NO: 3017 - RNA, 17 nt, Homo sapiens
uuggaccaauagcccac

SEQ ID NO: 3018 - RNA, 17 nt, Homo sapiens
agcugagaauguggaau

SEQ ID NO: 3019 - RNA, 17 nt, Homo sapiens
aauguggaauaccuaag

SEQ ID NO: 3020 - RNA, 17 nt, Homo sapiens
accuaaggauaacaccg

SEQ ID NO: 3021 - RNA, 17 nt, Homo sapiens
uaaggauaacaccgcuu

SEQ ID NO: 3022 - RNA, 17 nt, Homo sapiens
ucgcaaaaacguaucuc

SEQ ID NO: 3023 - RNA, 17 nt, Homo sapiens
aucuccuaauuugaggc

SEQ ID NO: 3024 - RNA, 17 nt, Homo sapiens
aggcucagaugaaaugc

SEQ ID NO: 3025 - RNA, 17 nt, Homo sapiens
cagaugaaaugcaucag

SEQ ID NO: 3026 - RNA, 17 nt, Homo sapiens
gggcauagaucagaaga

SEQ ID NO: 3027 - RNA, 17 nt, Homo sapiens
aucagaagacuacaaaa

SEQ ID NO: 3028 - RNA, 17 nt, Homo sapiens
cuacaaaaaugaagcug

SEQ ID NO: 3029 - RNA, 17 nt, Homo sapiens
gcucugaaaucuccuuu

SEQ ID NO: 3030 - RNA, 17 nt, Homo sapiens
ucaccccaaccccccaa

SEQ ID NO: 3031 - RNA, 17 nt, Homo sapiens
cccccaaaauuaguuug

SEQ ID NO: 3032 - RNA, 17 nt, Homo sapiens
uauggaagauaguuuuc

SEQ ID NO: 3033 - RNA, 17 nt, Homo sapiens
gcccccaaacccccucc

SEQ ID NO: 3034 - RNA, 17 nt, Homo sapiens
uggccacaacagggcau

SEQ ID NO: 3035 - RNA, 17 nt, Homo sapiens
aggugcgaaugacagua

SEQ ID NO: 3036 - RNA, 17 nt, Homo sapiens
ugcgaaugacaguagca

SEQ ID NO: 3037 - RNA, 17 nt, Homo sapiens
uagugugaauucaggua

SEQ ID NO: 3038 - RNA, 17 nt, Homo sapiens
gguaguaaauaugaaac

SEQ ID NO: 3039 - RNA, 17 nt, Homo sapiens
aauaugaaacuaggguu

SEQ ID NO: 3040 - RNA, 17 nt, Homo sapiens
gguuugaaauugauaau

SEQ ID NO: 3041 - RNA, 17 nt, Homo sapiens
ugaaauugauaaugcuu

SEQ ID NO: 3042 - RNA, 17 nt, Homo sapiens
aauugauaaugcuuuca

SEQ ID NO: 3043 - RNA, 17 nt, Homo sapiens
cuuucacaacauuugca

SEQ ID NO: 3044 - RNA, 17 nt, Homo sapiens
auuugcagauguuuuag

SEQ ID NO: 3045 - RNA, 17 nt, Homo sapiens
uuccuaaaauaauuucu

SEQ ID NO: 3046 - RNA, 17 nt, Homo sapiens
cuaaaauaauuucucua

SEQ ID NO: 3047 - RNA, 17 nt, Homo sapiens
ucucuacaauuggaaga

SEQ ID NO: 3048 - RNA, 17 nt, Homo sapiens
auuggaagauuggaaga

SEQ ID NO: 3049 - RNA, 17 nt, Homo sapiens
auuggaagauucagcua

SEQ ID NO: 3050 - RNA, 17 nt, Homo sapiens
uuuuccuaaucugugug

SEQ ID NO: 3051 - RNA, 17 nt, Homo sapiens
gcccuguaaccugacug

SEQ ID NO: 3052 - RNA, 17 nt, Homo sapiens
guaaccugacugguuaa

SEQ ID NO: 3053 - RNA, 17 nt, Homo sapiens
acugguuaacagcaguc

SEQ ID NO: 3054 - RNA, 17 nt, Homo sapiens
cuuuguaaacaguguuu

SEQ ID NO: 3055 - RNA, 17 nt, Homo sapiens
uguuuuaaacucuccua

SEQ ID NO: 3056 - RNA, 17 nt, Homo sapiens
ccuagucaauauccacc

SEQ ID NO: 3057 - RNA, 17 nt, Homo sapiens
cccauccaauuuaucaa

SEQ ID NO: 3058 - RNA, 17 nt, Homo sapiens
aggaagaaaugguucag

SEQ ID NO: 3059 - RNA, 17 nt, Homo sapiens
uucagaaaauauuuuca

SEQ ID NO: 3060 - RNA, 17 nt, Homo sapiens
cauacaaaauguuccuu

SEQ ID NO: 3061 - RNA, 17 nt, Homo sapiens
uuaaaguaauuuuugac

SEQ ID NO: 3062 - RNA, 17 nt, Homo sapiens
aauuuuugacucccaga

SEQ ID NO: 3063 - RNA, 17 nt, Homo sapiens
acucccagaucagucag

SEQ ID NO: 3064 - RNA, 17 nt, Homo sapiens
aguauuugauuuuuguc

SEQ ID NO: 3065 - RNA, 17 nt, Homo sapiens
uugucucaaugaaaaua

SEQ ID NO: 3066 - RNA, 17 nt, Homo sapiens
caaugaaaauaaaacua

SEQ ID NO: 3067 - RNA, 17 nt, Homo sapiens
aaaauaaaacuauauuc

SEQ ID NO: 3068 - RNA, 17 nt, Homo sapiens
gcugcgccggagucccg

SEQ ID NO: 3069 - RNA, 17 nt, Homo sapiens
cugcgccggagucccga

SEQ ID NO: 3070 - RNA, 17 nt, Homo sapiens
ggagucccgagcuagcc

SEQ ID NO: 3071 - RNA, 17 nt, Homo sapiens
cuagccccggcgccgcc

SEQ ID NO: 3072 - RNA, 17 nt, Homo sapiens
gccgcccagaccggacg

SEQ ID NO: 3073 - RNA, 17 nt, Homo sapiens
cccagaccggacgacag

SEQ ID NO: 3074 - RNA, 17 nt, Homo sapiens
ccagaccggacgacagg

SEQ ID NO: 3075 - RNA, 17 nt, Homo sapiens
gaccggacgacaggcca

SEQ ID NO: 3076 - RNA, 17 nt, Homo sapiens
ggacgacaggccaccuc

SEQ ID NO: 3077 - RNA, 17 nt, Homo sapiens
accucgucggcguccgc

SEQ ID NO: 3078 - RNA, 17 nt, Homo sapiens
guccgcccgaguccccg

SEQ ID NO: 3079 - RNA, 17 nt, Homo sapiens
ccgcgcacggcccccug

SEQ ID NO: 3080 - RNA, 17 nt, Homo sapiens
ggcccccugacuccguc

SEQ ID NO: 3081 - RNA, 17 nt, Homo sapiens
ccaguauugaucgggag

SEQ ID NO: 3082 - RNA, 17 nt, Homo sapiens
uauugaucgggagagcc

SEQ ID NO: 3083 - RNA, 17 nt, Homo sapiens
auugaucgggagagccg

SEQ ID NO: 3084 - RNA, 17 nt, Homo sapiens
uugaucgggagagccgg

SEQ ID NO: 3085 - RNA, 17 nt, Homo sapiens
gaucgggagagccggag

SEQ ID NO: 3086 - RNA, 17 nt, Homo sapiens
ggagagccggagcgagc

SEQ ID NO: 3087 - RNA, 17 nt, Homo sapiens
gagagccggagcgagcu

SEQ ID NO: 3088 - RNA, 17 nt, Homo sapiens
gccggagcgagcucuuc

SEQ ID NO: 3089 - RNA, 17 nt, Homo sapiens
agcucuucggggagcag

SEQ ID NO: 3090 - RNA, 17 nt, Homo sapiens
gcucuucggggagcagc

SEQ ID NO: 3091 - RNA, 17 nt, Homo sapiens
cucuucggggagcagcg

SEQ ID NO: 3092 - RNA, 17 nt, Homo sapiens
ucuucggggagcagcga

SEQ ID NO: 3093 - RNA, 17 nt, Homo sapiens
ggagcagcgaugcgacc

SEQ ID NO: 3094 - RNA, 17 nt, Homo sapiens
agcgaugcgacccuccg

SEQ ID NO: 3095 - RNA, 17 nt, Homo sapiens
gacccuccgggacggcc

SEQ ID NO: 3096 - RNA, 17 nt, Homo sapiens
acccuccgggacggccg

SEQ ID NO: 3097 - RNA, 17 nt, Homo sapiens
cccuccgggacggccgg

SEQ ID NO: 3098 - RNA, 17 nt, Homo sapiens
uccgggacggccggggc

SEQ ID NO: 3099 - RNA, 17 nt, Homo sapiens
ggacggccggggcagcg

SEQ ID NO: 3100 - RNA, 17 nt, Homo sapiens
gacggccggggcagcgc

SEQ ID NO: 3101 - RNA, 17 nt, Homo sapiens
acggccggggcagcgcu

SEQ ID NO: 3102 - RNA, 17 nt, Homo sapiens
gcgcuccuggcgcugcu

SEQ ID NO: 3103 - RNA, 17 nt, Homo sapiens
gcgcugcuggcugcgcu

SEQ ID NO: 3104 - RNA, 17 nt, Homo sapiens
cucugcccggcgagucg

SEQ ID NO: 3105 - RNA, 17 nt, Homo sapiens
ugcccggcgagucgggc

SEQ ID NO: 3106 - RNA, 17 nt, Homo sapiens
ggcgagucgggcucugg

SEQ ID NO: 3107 - RNA, 17 nt, Homo sapiens
gcgagucgggcucugga

SEQ ID NO: 3108 - RNA, 17 nt, Homo sapiens
cgggcucuggaggaaaa

SEQ ID NO: 3109 - RNA, 17 nt, Homo sapiens
gggcucuggaggaaaag

SEQ ID NO: 3110 - RNA, 17 nt, Homo sapiens
gcucuggaggaaaagaa

SEQ ID NO: 3111 - RNA, 17 nt, Homo sapiens
cucuggaggaaaagaaa

SEQ ID NO: 3112 - RNA, 17 nt, Homo sapiens
gaggaaaagaaaguuug

SEQ ID NO: 3113 - RNA, 17 nt, Homo sapiens
uuugccaaggcacgagu

SEQ ID NO: 3114 - RNA, 17 nt, Homo sapiens
caaggcacgaguaacaa

SEQ ID NO: 3115 - RNA, 17 nt, Homo sapiens
acgcaguugggcacuuu

SEQ ID NO: 3116 - RNA, 17 nt, Homo sapiens
cgcaguugggcacuuuu

SEQ ID NO: 3117 - RNA, 17 nt, Homo sapiens
gcacuuuugaagaucau

SEQ ID NO: 3118 - RNA, 17 nt, Homo sapiens
cuuuugaagaucauuuu

SEQ ID NO: 3119 - RNA, 17 nt, Homo sapiens
agccuccagaggauguu

SEQ ID NO: 3120 - RNA, 17 nt, Homo sapiens
ccuccagaggauguuca

SEQ ID NO: 3121 - RNA, 17 nt, Homo sapiens
cuccagaggauguucaa

SEQ ID NO: 3122 - RNA, 17 nt, Homo sapiens
auaacugugaggugguc

SEQ ID NO: 3123 - RNA, 17 nt, Homo sapiens
aacugugaggugguccu

SEQ ID NO: 3124 - RNA, 17 nt, Homo sapiens
ugugaggugguccuugg

SEQ ID NO: 3125 - RNA, 17 nt, Homo sapiens
ugguccuugggaauuug

SEQ ID NO: 3126 - RNA, 17 nt, Homo sapiens
gguccuugggaauuugg

SEQ ID NO: 3127 - RNA, 17 nt, Homo sapiens
guccuugggaauuugga

SEQ ID NO: 3128 - RNA, 17 nt, Homo sapiens
gggaauuuggaaauuac

SEQ ID NO: 3129 - RNA, 17 nt, Homo sapiens
ggaauuuggaaauuacc

SEQ ID NO: 3130 - RNA, 17 nt, Homo sapiens
uaugugcagaggaauua

SEQ ID NO: 3131 - RNA, 17 nt, Homo sapiens
ugugcagaggaauuaug

SEQ ID NO: 3132 - RNA, 17 nt, Homo sapiens
gugcagaggaauuauga

SEQ ID NO: 3133 - RNA, 17 nt, Homo sapiens
ggaauuaugaucuuucc

SEQ ID NO: 3134 - RNA, 17 nt, Homo sapiens
uucuuaaagaccaucca

SEQ ID NO: 3135 - RNA, 17 nt, Homo sapiens
accauccaggagguggc

SEQ ID NO: 3136 - RNA, 17 nt, Homo sapiens
ccauccaggagguggcu

SEQ ID NO: 3137 - RNA, 17 nt, Homo sapiens
auccaggagguggcugg

SEQ ID NO: 3138 - RNA, 17 nt, Homo sapiens
caggagguggcugguua

SEQ ID NO: 3139 - RNA, 17 nt, Homo sapiens
agguggcugguuauguc

SEQ ID NO: 3140 - RNA, 17 nt, Homo sapiens
aacacaguggagcgaau

SEQ ID NO: 3141 - RNA, 17 nt, Homo sapiens
acacaguggagcgaauu

SEQ ID NO: 3142 - RNA, 17 nt, Homo sapiens
aguggagcgaauuccuu

SEQ ID NO: 3143 - RNA, 17 nt, Homo sapiens
auuccuuuggaaaaccu

SEQ ID NO: 3144 - RNA, 17 nt, Homo sapiens
uuccuuuggaaaaccug

SEQ ID NO: 3145 - RNA, 17 nt, Homo sapiens
aaccugcagaucaucag

SEQ ID NO: 3146 - RNA, 17 nt, Homo sapiens
gaucaucagaggaaaua

SEQ ID NO: 3147 - RNA, 17 nt, Homo sapiens
ucaucagaggaaauaug

SEQ ID NO: 3148 - RNA, 17 nt, Homo sapiens
caucagaggaaauaugu

SEQ ID NO: 3149 - RNA, 17 nt, Homo sapiens
uguacuacgaaaauucc

SEQ ID NO: 3150 - RNA, 17 nt, Homo sapiens
cuaacuaugaugcaaau

SEQ ID NO: 3151 - RNA, 17 nt, Homo sapiens
auaaaaccggacugaag

SEQ ID NO: 3152 - RNA, 17 nt, Homo sapiens
uaaaaccggacugaagg

SEQ ID NO: 3153 - RNA, 17 nt, Homo sapiens
accggacugaaggagcu

SEQ ID NO: 3154 - RNA, 17 nt, Homo sapiens
ggacugaaggagcugcc

SEQ ID NO: 3155 - RNA, 17 nt, Homo sapiens
gacugaaggagcugccc

SEQ ID NO: 3156 - RNA, 17 nt, Homo sapiens
cugcccaugagaaauuu

SEQ ID NO: 3157 - RNA, 17 nt, Homo sapiens
gcccaugagaaauuuac

SEQ ID NO: 3158 - RNA, 17 nt, Homo sapiens
aauuuacaggaaauccu

SEQ ID NO: 3159 - RNA, 17 nt, Homo sapiens
auuuacaggaaauccug

SEQ ID NO: 3160 - RNA, 17 nt, Homo sapiens
uccugcauggcgccgug

SEQ ID NO: 3161 - RNA, 17 nt, Homo sapiens
cgccgugcgguucagca

SEQ ID NO: 3162 - RNA, 17 nt, Homo sapiens
ugcaacguggagagcau

SEQ ID NO: 3163 - RNA, 17 nt, Homo sapiens
gcaacguggagagcauc

SEQ ID NO: 3164 - RNA, 17 nt, Homo sapiens
aacguggagagcaucca

SEQ ID NO: 3165 - RNA, 17 nt, Homo sapiens
cauccaguggcgggaca

SEQ ID NO: 3166 - RNA, 17 nt, Homo sapiens
ccaguggcgggacauag

SEQ ID NO: 3167 - RNA, 17 nt, Homo sapiens
caguggcgggacauagu

SEQ ID NO: 3168 - RNA, 17 nt, Homo sapiens
aguggcgggacauaguc

SEQ ID NO: 3169 - RNA, 17 nt, Homo sapiens
ucagcagugacuuucuc

SEQ ID NO: 3170 - RNA, 17 nt, Homo sapiens
aacaugucgauggacuu

SEQ ID NO: 3171 - RNA, 17 nt, Homo sapiens
augucgauggacuucca

SEQ ID NO: 3172 - RNA, 17 nt, Homo sapiens
ugucgauggacuuccag

SEQ ID NO: 3173 - RNA, 17 nt, Homo sapiens
gacuuccagaaccaccu

SEQ ID NO: 3174 - RNA, 17 nt, Homo sapiens
aaccaccugggcagcug

SEQ ID NO: 3175 - RNA, 17 nt, Homo sapiens
accaccugggcagcugc

SEQ ID NO: 3176 - RNA, 17 nt, Homo sapiens
aaaagugugauccaagc

SEQ ID NO: 3177 - RNA, 17 nt, Homo sapiens
gucccaaugggagcugc

SEQ ID NO: 3178 - RNA, 17 nt, Homo sapiens
ucccaaugggagcugcu

SEQ ID NO: 3179 - RNA, 17 nt, Homo sapiens
cccaaugggagcugcug

SEQ ID NO: 3180 - RNA, 17 nt, Homo sapiens
gagcugcuggggugcag

SEQ ID NO: 3181 - RNA, 17 nt, Homo sapiens
agcugcuggggugcagg

SEQ ID NO: 3182 - RNA, 17 nt, Homo sapiens
gcugcuggggugcagga

SEQ ID NO: 3183 - RNA, 17 nt, Homo sapiens
ggggugcaggagaggag

SEQ ID NO: 3184 - RNA, 17 nt, Homo sapiens
gggugcaggagaggaga

SEQ ID NO: 3185 - RNA, 17 nt, Homo sapiens
gugcaggagaggagaac

SEQ ID NO: 3186 - RNA, 17 nt, Homo sapiens
gcaggagaggagaacug

SEQ ID NO: 3187 - RNA, 17 nt, Homo sapiens
caggagaggagaacugc

SEQ ID NO: 3188 - RNA, 17 nt, Homo sapiens
ggagaggagaacugcca

SEQ ID NO: 3189 - RNA, 17 nt, Homo sapiens
aacugccagaaacugac

SEQ ID NO: 3190 - RNA, 17 nt, Homo sapiens
cagaaacugaccaaaau

SEQ ID NO: 3191 - RNA, 17 nt, Homo sapiens
agugcuccgggcgcugc

SEQ ID NO: 3192 - RNA, 17 nt, Homo sapiens
gugcuccgggcgcugcc

SEQ ID NO: 3193 - RNA, 17 nt, Homo sapiens
gcugccguggcaagucc

SEQ ID NO: 3194 - RNA, 17 nt, Homo sapiens
cccccagugacugcugc

SEQ ID NO: 3195 - RNA, 17 nt, Homo sapiens
gugcugcaggcugcaca

SEQ ID NO: 3196 - RNA, 17 nt, Homo sapiens
gcugcacaggcccccgg

SEQ ID NO: 3197 - RNA, 17 nt, Homo sapiens
aggcccccgggagagcg

SEQ ID NO: 3198 - RNA, 17 nt, Homo sapiens
ggcccccgggagagcga

SEQ ID NO: 3199 - RNA, 17 nt, Homo sapiens
gcccccgggagagcgac

SEQ ID NO: 3200 - RNA, 17 nt, Homo sapiens
ccccgggagagcgacug

SEQ ID NO: 3201 - RNA, 17 nt, Homo sapiens
gggagagcgacugccug

SEQ ID NO: 3202 - RNA, 17 nt, Homo sapiens
gacugccuggucugccg

SEQ ID NO: 3203 - RNA, 17 nt, Homo sapiens
caaauuccgagacgaag

SEQ ID NO: 3204 - RNA, 17 nt, Homo sapiens
aauuccgagacgaagcc

SEQ ID NO: 3205 - RNA, 17 nt, Homo sapiens
uccgagacgaagccacg

SEQ ID NO: 3206 - RNA, 17 nt, Homo sapiens
acgugcaaggacaccug

SEQ ID NO: 3207 - RNA, 17 nt, Homo sapiens
cgugcaaggacaccugc

SEQ ID NO: 3208 - RNA, 17 nt, Homo sapiens
acguaccagauggaugu

SEQ ID NO: 3209 - RNA, 17 nt, Homo sapiens
uaccagauggaugugaa

SEQ ID NO: 3210 - RNA, 17 nt, Homo sapiens
accagauggaugugaac

SEQ ID NO: 3211 - RNA, 17 nt, Homo sapiens
auggaugugaaccccga

SEQ ID NO: 3212 - RNA, 17 nt, Homo sapiens
ugaaccccgagggcaaa

SEQ ID NO: 3213 - RNA, 17 nt, Homo sapiens
aaccccgagggcaaaua

SEQ ID NO: 3214 - RNA, 17 nt, Homo sapiens
accccgagggcaaauac

SEQ ID NO: 3215 - RNA, 17 nt, Homo sapiens
acagcuuuggugccacc

SEQ ID NO: 3216 - RNA, 17 nt, Homo sapiens
accugcgugaagaagug

SEQ ID NO: 3217 - RNA, 17 nt, Homo sapiens
ugcgugaagaagugucc

SEQ ID NO: 3218 - RNA, 17 nt, Homo sapiens
aauuauguggugacaga

SEQ ID NO: 3219 - RNA, 17 nt, Homo sapiens
uauguggugacagauca

SEQ ID NO: 3220 - RNA, 17 nt, Homo sapiens
uggugacagaucacggc

SEQ ID NO: 3221 - RNA, 17 nt, Homo sapiens
cagaucacggcucgugc

SEQ ID NO: 3222 - RNA, 17 nt, Homo sapiens
gugcguccgagccugug

SEQ ID NO: 3223 - RNA, 17 nt, Homo sapiens
gagccuguggggccgac

SEQ ID NO: 3224 - RNA, 17 nt, Homo sapiens
agccuguggggccgaca

SEQ ID NO: 3225 - RNA, 17 nt, Homo sapiens
gccuguggggccgacag

SEQ ID NO: 3226 - RNA, 17 nt, Homo sapiens
guggggccgacagcuau

SEQ ID NO: 3227 - RNA, 17 nt, Homo sapiens
acagcuaugagauggag

SEQ ID NO: 3228 - RNA, 17 nt, Homo sapiens
agcuaugagauggagga

SEQ ID NO: 3229 - RNA, 17 nt, Homo sapiens
uaugagauggaggaaga

SEQ ID NO: 3230 - RNA, 17 nt, Homo sapiens
augagauggaggaagac

SEQ ID NO: 3231 - RNA, 17 nt, Homo sapiens
gagauggaggaagacgg

SEQ ID NO: 3232 - RNA, 17 nt, Homo sapiens
agauggaggaagacggc

SEQ ID NO: 3233 - RNA, 17 nt, Homo sapiens
uggaggaagacggcguc

SEQ ID NO: 3234 - RNA, 17 nt, Homo sapiens
aggaagacggcguccgc

SEQ ID NO: 3235 - RNA, 17 nt, Homo sapiens
aaguguaagaagugcga

SEQ ID NO: 3236 - RNA, 17 nt, Homo sapiens
agaagugcgaagggccu

SEQ ID NO: 3237 - RNA, 17 nt, Homo sapiens
agugcgaagggccuugc

SEQ ID NO: 3238 - RNA, 17 nt, Homo sapiens
gugcgaagggccuugcc

SEQ ID NO: 3239 - RNA, 17 nt, Homo sapiens
uguguaacggaauaggu

SEQ ID NO: 3240 - RNA, 17 nt, Homo sapiens
guguaacggaauaggua

SEQ ID NO: 3241 - RNA, 17 nt, Homo sapiens
acggaauagguauuggu

SEQ ID NO: 3242 - RNA, 17 nt, Homo sapiens
uagguauuggugaauuu

SEQ ID NO: 3243 - RNA, 17 nt, Homo sapiens
guauuggugaauuuaaa

SEQ ID NO: 3244 - RNA, 17 nt, Homo sapiens
aauuuaaagacucacuc

SEQ ID NO: 3245 - RNA, 17 nt, Homo sapiens
aaugcuacgaauauuaa

SEQ ID NO: 3246 - RNA, 17 nt, Homo sapiens
ccaucaguggcgaucuc

SEQ ID NO: 3247 - RNA, 17 nt, Homo sapiens
ucaguggcgaucuccac

SEQ ID NO: 3248 - RNA, 17 nt, Homo sapiens
auccugccgguggcauu

SEQ ID NO: 3249 - RNA, 17 nt, Homo sapiens
cugccgguggcauuuag

SEQ ID NO: 3250 - RNA, 17 nt, Homo sapiens
ggcauuuaggggugacu

SEQ ID NO: 3251 - RNA, 17 nt, Homo sapiens
gcauuuaggggugacuc

SEQ ID NO: 3252 - RNA, 17 nt, Homo sapiens
cauuuaggggugacucc

SEQ ID NO: 3253 - RNA, 17 nt, Homo sapiens
uuaggggugacuccuuc

SEQ ID NO: 3254 - RNA, 17 nt, Homo sapiens
ccuccucuggauccaca

SEQ ID NO: 3255 - RNA, 17 nt, Homo sapiens
cuccucuggauccacag

SEQ ID NO: 3256 - RNA, 17 nt, Homo sapiens
gauccacaggaacugga

SEQ ID NO: 3257 - RNA, 17 nt, Homo sapiens
auccacaggaacuggau

SEQ ID NO: 3258 - RNA, 17 nt, Homo sapiens
caggaacuggauauucu

SEQ ID NO: 3259 - RNA, 17 nt, Homo sapiens
aggaacuggauauucug

SEQ ID NO: 3260 - RNA, 17 nt, Homo sapiens
gauauucugaaaaccgu

SEQ ID NO: 3261 - RNA, 17 nt, Homo sapiens
accguaaaggaaaucac

SEQ ID NO: 3262 - RNA, 17 nt, Homo sapiens
ccguaaaggaaaucaca

SEQ ID NO: 3263 - RNA, 17 nt, Homo sapiens
aaaucacaggguuuuug

SEQ ID NO: 3264 - RNA, 17 nt, Homo sapiens
aaucacaggguuuuugc

SEQ ID NO: 3265 - RNA, 17 nt, Homo sapiens
uuuuugcugauucaggc

SEQ ID NO: 3266 - RNA, 17 nt, Homo sapiens
cugauucaggcuuggcc

SEQ ID NO: 3267 - RNA, 17 nt, Homo sapiens
ucaggcuuggccugaaa

SEQ ID NO: 3268 - RNA, 17 nt, Homo sapiens
cuuggccugaaaacagg

SEQ ID NO: 3269 - RNA, 17 nt, Homo sapiens
ugaaaacaggacggacc

SEQ ID NO: 3270 - RNA, 17 nt, Homo sapiens
gaaaacaggacggaccu

SEQ ID NO: 3271 - RNA, 17 nt, Homo sapiens
aacaggacggaccucca

SEQ ID NO: 3272 - RNA, 17 nt, Homo sapiens
acaggacggaccuccau

SEQ ID NO: 3273 - RNA, 17 nt, Homo sapiens
augccuuugagaaccua

SEQ ID NO: 3274 - RNA, 17 nt, Homo sapiens
gccuuugagaaccuaga

SEQ ID NO: 3275 - RNA, 17 nt, Homo sapiens
agaaccuagaaaucaua

SEQ ID NO: 3276 - RNA, 17 nt, Homo sapiens
ucauacgcggcaggacc

SEQ ID NO: 3277 - RNA, 17 nt, Homo sapiens
acgcggcaggaccaagc

SEQ ID NO: 3278 - RNA, 17 nt, Homo sapiens
cgcggcaggaccaagca

SEQ ID NO: 3279 - RNA, 17 nt, Homo sapiens
agcaacauggucaguuu

SEQ ID NO: 3280 - RNA, 17 nt, Homo sapiens
gucagccugaacauaac

SEQ ID NO: 3281 - RNA, 17 nt, Homo sapiens
acauccuugggauuacg

SEQ ID NO: 3282 - RNA, 17 nt, Homo sapiens
cauccuugggauuacgc

SEQ ID NO: 3283 - RNA, 17 nt, Homo sapiens
auccuugggauuacgcu

SEQ ID NO: 3284 - RNA, 17 nt, Homo sapiens
ucccucaaggagauaag

SEQ ID NO: 3285 - RNA, 17 nt, Homo sapiens
cccucaaggagauaagu

SEQ ID NO: 3286 - RNA, 17 nt, Homo sapiens
cucaaggagauaaguga

SEQ ID NO: 3287 - RNA, 17 nt, Homo sapiens
agauaagugauggagau

SEQ ID NO: 3288 - RNA, 17 nt, Homo sapiens
uaagugauggagaugug

SEQ ID NO: 3289 - RNA, 17 nt, Homo sapiens
aagugauggagauguga

SEQ ID NO: 3290 - RNA, 17 nt, Homo sapiens
gugauggagaugugaua

SEQ ID NO: 3291 - RNA, 17 nt, Homo sapiens
ggagaugugauaauuuc

SEQ ID NO: 3292 - RNA, 17 nt, Homo sapiens
uaauuucaggaaacaaa

SEQ ID NO: 3293 - RNA, 17 nt, Homo sapiens
aauuucaggaaacaaaa

SEQ ID NO: 3294 - RNA, 17 nt, Homo sapiens
aauaaacuggaaaaaac

SEQ ID NO: 3295 - RNA, 17 nt, Homo sapiens
auaaacuggaaaaaacu

SEQ ID NO: 3296 - RNA, 17 nt, Homo sapiens
aacuguuugggaccucc

SEQ ID NO: 3297 - RNA, 17 nt, Homo sapiens
acuguuugggaccuccg

SEQ ID NO: 3298 - RNA, 17 nt, Homo sapiens
cuguuugggaccuccgg

SEQ ID NO: 3299 - RNA, 17 nt, Homo sapiens
ggaccuccggucagaaa

SEQ ID NO: 3300 - RNA, 17 nt, Homo sapiens
uccggucagaaaaccaa

SEQ ID NO: 3301 - RNA, 17 nt, Homo sapiens
aagcaacagaggugaaa

SEQ ID NO: 3302 - RNA, 17 nt, Homo sapiens
gcaacagaggugaaaac

SEQ ID NO: 3303 - RNA, 17 nt, Homo sapiens
acagaggugaaaacagc

SEQ ID NO: 3304 - RNA, 17 nt, Homo sapiens
agcugcaaggccacagg

SEQ ID NO: 3305 - RNA, 17 nt, Homo sapiens
aggccacaggccagguc

SEQ ID NO: 3306 - RNA, 17 nt, Homo sapiens
acaggccaggucugcca

SEQ ID NO: 3307 - RNA, 17 nt, Homo sapiens
gcucccccgagggcugc

SEQ ID NO: 3308 - RNA, 17 nt, Homo sapiens
ucccccgagggcugcug

SEQ ID NO: 3309 - RNA, 17 nt, Homo sapiens
cccccgagggcugcugg

SEQ ID NO: 3310 - RNA, 17 nt, Homo sapiens
gggcugcuggggcccgg

SEQ ID NO: 3311 - RNA, 17 nt, Homo sapiens
ggcugcuggggcccgga

SEQ ID NO: 3312 - RNA, 17 nt, Homo sapiens
gcugcuggggcccggag

SEQ ID NO: 3313 - RNA, 17 nt, Homo sapiens
uggggcccggagcccag

SEQ ID NO: 3314 - RNA, 17 nt, Homo sapiens
ggggcccggagcccagg

SEQ ID NO: 3315 - RNA, 17 nt, Homo sapiens
ggagcccagggacugcg

SEQ ID NO: 3316 - RNA, 17 nt, Homo sapiens
gagcccagggacugcgu

SEQ ID NO: 3317 - RNA, 17 nt, Homo sapiens
agcccagggacugcguc

SEQ ID NO: 3318 - RNA, 17 nt, Homo sapiens
cucuugccggaauguca

SEQ ID NO: 3319 - RNA, 17 nt, Homo sapiens
ucuugccggaaugucag

SEQ ID NO: 3320 - RNA, 17 nt, Homo sapiens
ugucagccgaggcaggg

SEQ ID NO: 3321 - RNA, 17 nt, Homo sapiens
ucagccgaggcagggaa

SEQ ID NO: 3322 - RNA, 17 nt, Homo sapiens
ccgaggcagggaaugcg

SEQ ID NO: 3323 - RNA, 17 nt, Homo sapiens
cgaggcagggaaugcgu

SEQ ID NO: 3324 - RNA, 17 nt, Homo sapiens
gaggcagggaaugcgug

SEQ ID NO: 3325 - RNA, 17 nt, Homo sapiens
gaaugcguggacaagug

SEQ ID NO: 3326 - RNA, 17 nt, Homo sapiens
aaugcguggacaagugc

SEQ ID NO: 3327 - RNA, 17 nt, Homo sapiens
aagcuucuggaggguga

SEQ ID NO: 3328 - RNA, 17 nt, Homo sapiens
agcuucuggagggugag

SEQ ID NO: 3329 - RNA, 17 nt, Homo sapiens
cuucuggagggugagcc

SEQ ID NO: 3330 - RNA, 17 nt, Homo sapiens
uucuggagggugagcca

SEQ ID NO: 3331 - RNA, 17 nt, Homo sapiens
uggagggugagccaagg

SEQ ID NO: 3332 - RNA, 17 nt, Homo sapiens
ugagccaagggaguuug

SEQ ID NO: 3333 - RNA, 17 nt, Homo sapiens
gagccaagggaguuugu

SEQ ID NO: 3334 - RNA, 17 nt, Homo sapiens
agccaagggaguuugug

SEQ ID NO: 3335 - RNA, 17 nt, Homo sapiens
gaguuuguggagaacuc

SEQ ID NO: 3336 - RNA, 17 nt, Homo sapiens
aguuuguggagaacucu

SEQ ID NO: 3337 - RNA, 17 nt, Homo sapiens
uuuguggagaacucuga

SEQ ID NO: 3338 - RNA, 17 nt, Homo sapiens
agaacucugagugcaua

SEQ ID NO: 3339 - RNA, 17 nt, Homo sapiens
gccacccagagugccug

SEQ ID NO: 3340 - RNA, 17 nt, Homo sapiens
cugccucaggccaugaa

SEQ ID NO: 3341 - RNA, 17 nt, Homo sapiens
caggccaugaacaucac

SEQ ID NO: 3342 - RNA, 17 nt, Homo sapiens
ccugcacaggacgggga

SEQ ID NO: 3343 - RNA, 17 nt, Homo sapiens
cugcacaggacggggac

SEQ ID NO: 3344 - RNA, 17 nt, Homo sapiens
cacaggacggggaccag

SEQ ID NO: 3345 - RNA, 17 nt, Homo sapiens
acaggacggggaccaga

SEQ ID NO: 3346 - RNA, 17 nt, Homo sapiens
caggacggggaccagac

SEQ ID NO: 3347 - RNA, 17 nt, Homo sapiens
aggacggggaccagaca

SEQ ID NO: 3348 - RNA, 17 nt, Homo sapiens
ggggaccagacaacugu

SEQ ID NO: 3349 - RNA, 17 nt, Homo sapiens
acuacauugacggcccc

SEQ ID NO: 3350 - RNA, 17 nt, Homo sapiens
acauugacggcccccac

SEQ ID NO: 3351 - RNA, 17 nt, Homo sapiens
ugcgucaagaccugccc

SEQ ID NO: 3352 - RNA, 17 nt, Homo sapiens
accugcccggcaggagu

SEQ ID NO: 3353 - RNA, 17 nt, Homo sapiens
gcccggcaggagucaug

SEQ ID NO: 3354 - RNA, 17 nt, Homo sapiens
cccggcaggagucaugg

SEQ ID NO: 3355 - RNA, 17 nt, Homo sapiens
ggagucaugggagaaaa

SEQ ID NO: 3356 - RNA, 17 nt, Homo sapiens
gagucaugggagaaaac

SEQ ID NO: 3357 - RNA, 17 nt, Homo sapiens
agucaugggagaaaaca

SEQ ID NO: 3358 - RNA, 17 nt, Homo sapiens
ucaugggagaaaacaac

SEQ ID NO: 3359 - RNA, 17 nt, Homo sapiens
aacacccuggucuggaa

SEQ ID NO: 3360 - RNA, 17 nt, Homo sapiens
ccuggucuggaaguacg

SEQ ID NO: 3361 - RNA, 17 nt, Homo sapiens
cuggucuggaaguacgc

SEQ ID NO: 3362 - RNA, 17 nt, Homo sapiens
aguacgcagacgccggc

SEQ ID NO: 3363 - RNA, 17 nt, Homo sapiens
cagacgccggccaugug

SEQ ID NO: 3364 - RNA, 17 nt, Homo sapiens
gcaccuacggaugcacu

SEQ ID NO: 3365 - RNA, 17 nt, Homo sapiens
caccuacggaugcacug

SEQ ID NO: 3366 - RNA, 17 nt, Homo sapiens
gaugcacugggccaggu

SEQ ID NO: 3367 - RNA, 17 nt, Homo sapiens
augcacugggccagguc

SEQ ID NO: 3368 - RNA, 17 nt, Homo sapiens
cugggccaggucuugaa

SEQ ID NO: 3369 - RNA, 17 nt, Homo sapiens
caggucuugaaggcugu

SEQ ID NO: 3370 - RNA, 17 nt, Homo sapiens
gucuugaaggcugucca

SEQ ID NO: 3371 - RNA, 17 nt, Homo sapiens
uguccaacgaaugggcc

SEQ ID NO: 3372 - RNA, 17 nt, Homo sapiens
caacgaaugggccuaag

SEQ ID NO: 3373 - RNA, 17 nt, Homo sapiens
aacgaaugggccuaaga

SEQ ID NO: 3374 - RNA, 17 nt, Homo sapiens
gggccuaagaucccguc

SEQ ID NO: 3375 - RNA, 17 nt, Homo sapiens
ucgccacugggauggug

SEQ ID NO: 3376 - RNA, 17 nt, Homo sapiens
cgccacugggauggugg

SEQ ID NO: 3377 - RNA, 17 nt, Homo sapiens
gccacugggaugguggg

SEQ ID NO: 3378 - RNA, 17 nt, Homo sapiens
acugggauggugggggc

SEQ ID NO: 3379 - RNA, 17 nt, Homo sapiens
gggauggugggggcccu

SEQ ID NO: 3380 - RNA, 17 nt, Homo sapiens
ggauggugggggcccuc

SEQ ID NO: 3381 - RNA, 17 nt, Homo sapiens
gauggugggggcccucc

SEQ ID NO: 3382 - RNA, 17 nt, Homo sapiens
auggugggggcccuccu

SEQ ID NO: 3383 - RNA, 17 nt, Homo sapiens
uugcugcuggugguggc

SEQ ID NO: 3384 - RNA, 17 nt, Homo sapiens
cugcuggugguggcccu

SEQ ID NO: 3385 - RNA, 17 nt, Homo sapiens
cuggugguggcccuggg

SEQ ID NO: 3386 - RNA, 17 nt, Homo sapiens
guggcccuggggaucgg

SEQ ID NO: 3387 - RNA, 17 nt, Homo sapiens
uggcccuggggaucggc

SEQ ID NO: 3388 - RNA, 17 nt, Homo sapiens
ggcccuggggaucggcc

SEQ ID NO: 3389 - RNA, 17 nt, Homo sapiens
gcccuggggaucggccu

SEQ ID NO: 3390 - RNA, 17 nt, Homo sapiens
uggggaucggccucuuc

SEQ ID NO: 3391 - RNA, 17 nt, Homo sapiens
cuucaugcgaaggcgcc

SEQ ID NO: 3392 - RNA, 17 nt, Homo sapiens
caugcgaaggcgccaca

SEQ ID NO: 3393 - RNA, 17 nt, Homo sapiens
caucguucggaagcgca

SEQ ID NO: 3394 - RNA, 17 nt, Homo sapiens
aucguucggaagcgcac

SEQ ID NO: 3395 - RNA, 17 nt, Homo sapiens
cacgcugcggaggcugc

SEQ ID NO: 3396 - RNA, 17 nt, Homo sapiens
acgcugcggaggcugcu

SEQ ID NO: 3397 - RNA, 17 nt, Homo sapiens
gcugcggaggcugcugc

SEQ ID NO: 3398 - RNA, 17 nt, Homo sapiens
cugcugcaggagaggga

SEQ ID NO: 3399 - RNA, 17 nt, Homo sapiens
ugcugcaggagagggag

SEQ ID NO: 3400 - RNA, 17 nt, Homo sapiens
cugcaggagagggagcu

SEQ ID NO: 3401 - RNA, 17 nt, Homo sapiens
gcaggagagggagcuug

SEQ ID NO: 3402 - RNA, 17 nt, Homo sapiens
caggagagggagcuugu

SEQ ID NO: 3403 - RNA, 17 nt, Homo sapiens
aggagagggagcuugug

SEQ ID NO: 3404 - RNA, 17 nt, Homo sapiens
gagcuuguggagccucu

SEQ ID NO: 3405 - RNA, 17 nt, Homo sapiens
agcuuguggagccucuu

SEQ ID NO: 3406 - RNA, 17 nt, Homo sapiens
cacccaguggagaagcu

SEQ ID NO: 3407 - RNA, 17 nt, Homo sapiens
acccaguggagaagcuc

SEQ ID NO: 3408 - RNA, 17 nt, Homo sapiens
ccaguggagaagcuccc

SEQ ID NO: 3409 - RNA, 17 nt, Homo sapiens
gcucucuugaggaucuu

SEQ ID NO: 3410 - RNA, 17 nt, Homo sapiens
ucucuugaggaucuuga

SEQ ID NO: 3411 - RNA, 17 nt, Homo sapiens
cucuugaggaucuugaa

SEQ ID NO: 3412 - RNA, 17 nt, Homo sapiens
aggaucuugaaggaaac

SEQ ID NO: 3413 - RNA, 17 nt, Homo sapiens
aucuugaaggaaacuga

SEQ ID NO: 3414 - RNA, 17 nt, Homo sapiens
ucuugaaggaaacugaa

SEQ ID NO: 3415 - RNA, 17 nt, Homo sapiens
aggaaacugaauucaaa

SEQ ID NO: 3416 - RNA, 17 nt, Homo sapiens
uucaaaaagaucaaagu

SEQ ID NO: 3417 - RNA, 17 nt, Homo sapiens
aaagugcugggcuccgg

SEQ ID NO: 3418 - RNA, 17 nt, Homo sapiens
aagugcugggcuccggu

SEQ ID NO: 3419 - RNA, 17 nt, Homo sapiens
ugggcuccggugcguuc

SEQ ID NO: 3420 - RNA, 17 nt, Homo sapiens
gugcguucggcacggug

SEQ ID NO: 3421 - RNA, 17 nt, Homo sapiens
uucggcacgguguauaa

SEQ ID NO: 3422 - RNA, 17 nt, Homo sapiens
guguauaagggacucug

SEQ ID NO: 3423 - RNA, 17 nt, Homo sapiens
uguauaagggacucugg

SEQ ID NO: 3424 - RNA, 17 nt, Homo sapiens
guauaagggacucugga

SEQ ID NO: 3425 - RNA, 17 nt, Homo sapiens
gggacucuggaucccag

SEQ ID NO: 3426 - RNA, 17 nt, Homo sapiens
ggacucuggaucccaga

SEQ ID NO: 3427 - RNA, 17 nt, Homo sapiens
ggaucccagaaggugag

SEQ ID NO: 3428 - RNA, 17 nt, Homo sapiens
ucccagaaggugagaaa

SEQ ID NO: 3429 - RNA, 17 nt, Homo sapiens
cagaaggugagaaaguu

SEQ ID NO: 3430 - RNA, 17 nt, Homo sapiens
gaaggugagaaaguuaa

SEQ ID NO: 3431 - RNA, 17 nt, Homo sapiens
gcuaucaaggaauuaag

SEQ ID NO: 3432 - RNA, 17 nt, Homo sapiens
cuaucaaggaauuaaga

SEQ ID NO: 3433 - RNA, 17 nt, Homo sapiens
ggaauuaagagaagcaa

SEQ ID NO: 3434 - RNA, 17 nt, Homo sapiens
aauuaagagaagcaaca

SEQ ID NO: 3435 - RNA, 17 nt, Homo sapiens
acaucuccgaaagccaa

SEQ ID NO: 3436 - RNA, 17 nt, Homo sapiens
gccaacaaggaaauccu

SEQ ID NO: 3437 - RNA, 17 nt, Homo sapiens
ccaacaaggaaauccuc

SEQ ID NO: 3438 - RNA, 17 nt, Homo sapiens
aaauccucgaugaagcc

SEQ ID NO: 3439 - RNA, 17 nt, Homo sapiens
uccucgaugaagccuac

SEQ ID NO: 3440 - RNA, 17 nt, Homo sapiens
gccuacgugauggccag

SEQ ID NO: 3441 - RNA, 17 nt, Homo sapiens
uacgugauggccagcgu

SEQ ID NO: 3442 - RNA, 17 nt, Homo sapiens
gccagcguggacaaccc

SEQ ID NO: 3443 - RNA, 17 nt, Homo sapiens
ccagcguggacaacccc

SEQ ID NO: 3444 - RNA, 17 nt, Homo sapiens
cgccugcugggcaucug

SEQ ID NO: 3445 - RNA, 17 nt, Homo sapiens
gccugcugggcaucugc

SEQ ID NO: 3446 - RNA, 17 nt, Homo sapiens
ugcccuucggcugccuc

SEQ ID NO: 3447 - RNA, 17 nt, Homo sapiens
ugccuccuggacuaugu

SEQ ID NO: 3448 - RNA, 17 nt, Homo sapiens
gccuccuggacuauguc

SEQ ID NO: 3449 - RNA, 17 nt, Homo sapiens
cuauguccgggaacaca

SEQ ID NO: 3450 - RNA, 17 nt, Homo sapiens
uauguccgggaacacaa

SEQ ID NO: 3451 - RNA, 17 nt, Homo sapiens
auguccgggaacacaaa

SEQ ID NO: 3452 - RNA, 17 nt, Homo sapiens
aacacaaagacaauauu

SEQ ID NO: 3453 - RNA, 17 nt, Homo sapiens
acaauauuggcucccag

SEQ ID NO: 3454 - RNA, 17 nt, Homo sapiens
gcucaacuggugugugc

SEQ ID NO: 3455 - RNA, 17 nt, Homo sapiens
ugugugcagaucgcaaa

SEQ ID NO: 3456 - RNA, 17 nt, Homo sapiens
aucgcaaagggcaugaa

SEQ ID NO: 3457 - RNA, 17 nt, Homo sapiens
ucgcaaagggcaugaac

SEQ ID NO: 3458 - RNA, 17 nt, Homo sapiens
aagggcaugaacuacuu

SEQ ID NO: 3459 - RNA, 17 nt, Homo sapiens
aacuacuuggaggaccg

SEQ ID NO: 3460 - RNA, 17 nt, Homo sapiens
acuacuuggaggaccgu

SEQ ID NO: 3461 - RNA, 17 nt, Homo sapiens
uacuuggaggaccgucg

SEQ ID NO: 3462 - RNA, 17 nt, Homo sapiens
acuuggaggaccgucgc

SEQ ID NO: 3463 - RNA, 17 nt, Homo sapiens
cgucgcuuggugcaccg

SEQ ID NO: 3464 - RNA, 17 nt, Homo sapiens
ugcaccgcgaccuggca

SEQ ID NO: 3465 - RNA, 17 nt, Homo sapiens
cgcgaccuggcagccag

SEQ ID NO: 3466 - RNA, 17 nt, Homo sapiens
ggcagccaggaacguac

SEQ ID NO: 3467 - RNA, 17 nt, Homo sapiens
gcagccaggaacguacu

SEQ ID NO: 3468 - RNA, 17 nt, Homo sapiens
aacguacuggugaaaac

SEQ ID NO: 3469 - RNA, 17 nt, Homo sapiens
guacuggugaaaacacc

SEQ ID NO: 3470 - RNA, 17 nt, Homo sapiens
caugucaagaucacaga

SEQ ID NO: 3471 - RNA, 17 nt, Homo sapiens
agaucacagauuuuggg

SEQ ID NO: 3472 - RNA, 17 nt, Homo sapiens
cagauuuugggcuggcc

SEQ ID NO: 3473 - RNA, 17 nt, Homo sapiens
agauuuugggcuggcca

SEQ ID NO: 3474 - RNA, 17 nt, Homo sapiens
uuugggcuggccaaacu

SEQ ID NO: 3475 - RNA, 17 nt, Homo sapiens
aaacugcugggugcgga

SEQ ID NO: 3476 - RNA, 17 nt, Homo sapiens
aacugcugggugcggaa

SEQ ID NO: 3477 - RNA, 17 nt, Homo sapiens
cugggugcggaagagaa

SEQ ID NO: 3478 - RNA, 17 nt, Homo sapiens
ugggugcggaagagaaa

SEQ ID NO: 3479 - RNA, 17 nt, Homo sapiens
gugcggaagagaaagaa

SEQ ID NO: 3480 - RNA, 17 nt, Homo sapiens
gcggaagagaaagaaua

SEQ ID NO: 3481 - RNA, 17 nt, Homo sapiens
aagagaaagaauaccau

SEQ ID NO: 3482 - RNA, 17 nt, Homo sapiens
accaugcagaaggaggc

SEQ ID NO: 3483 - RNA, 17 nt, Homo sapiens
augcagaaggaggcaaa

SEQ ID NO: 3484 - RNA, 17 nt, Homo sapiens
ugcagaaggaggcaaag

SEQ ID NO: 3485 - RNA, 17 nt, Homo sapiens
cagaaggaggcaaagug

SEQ ID NO: 3486 - RNA, 17 nt, Homo sapiens
uaucaaguggauggcau

SEQ ID NO: 3487 - RNA, 17 nt, Homo sapiens
aucaaguggauggcauu

SEQ ID NO: 3488 - RNA, 17 nt, Homo sapiens
aaguggauggcauugga

SEQ ID NO: 3489 - RNA, 17 nt, Homo sapiens
auggcauuggaaucaau

SEQ ID NO: 3490 - RNA, 17 nt, Homo sapiens
uggcauuggaaucaauu

SEQ ID NO: 3491 - RNA, 17 nt, Homo sapiens
uuuacacagaaucuaua

SEQ ID NO: 3492 - RNA, 17 nt, Homo sapiens
acccaccagagugaugu

SEQ ID NO: 3493 - RNA, 17 nt, Homo sapiens
accagagugaugucugg

SEQ ID NO: 3494 - RNA, 17 nt, Homo sapiens
ugaugucuggagcuacg

SEQ ID NO: 3495 - RNA, 17 nt, Homo sapiens
gaugucuggagcuacgg

SEQ ID NO: 3496 - RNA, 17 nt, Homo sapiens
ggagcuacggggugacc

SEQ ID NO: 3497 - RNA, 17 nt, Homo sapiens
gagcuacggggugaccg

SEQ ID NO: 3498 - RNA, 17 nt, Homo sapiens
agcuacggggugaccgu

SEQ ID NO: 3499 - RNA, 17 nt, Homo sapiens
uacggggugaccguuug

SEQ ID NO: 3500 - RNA, 17 nt, Homo sapiens
gaccguuugggaguuga

SEQ ID NO: 3501 - RNA, 17 nt, Homo sapiens
accguuugggaguugau

SEQ ID NO: 3502 - RNA, 17 nt, Homo sapiens
ccguuugggaguugaug

SEQ ID NO: 3503 - RNA, 17 nt, Homo sapiens
ugggaguugaugaccuu

SEQ ID NO: 3504 - RNA, 17 nt, Homo sapiens
gaguugaugaccuuugg

SEQ ID NO: 3505 - RNA, 17 nt, Homo sapiens
ugaccuuuggauccaag

SEQ ID NO: 3506 - RNA, 17 nt, Homo sapiens
gaccuuuggauccaagc

SEQ ID NO: 3507 - RNA, 17 nt, Homo sapiens
agccauaugacggaauc

SEQ ID NO: 3508 - RNA, 17 nt, Homo sapiens
cauaugacggaaucccu

SEQ ID NO: 3509 - RNA, 17 nt, Homo sapiens
auaugacggaaucccug

SEQ ID NO: 3510 - RNA, 17 nt, Homo sapiens
cugccagcgagaucucc

SEQ ID NO: 3511 - RNA, 17 nt, Homo sapiens
gccagcgagaucuccuc

SEQ ID NO: 3512 - RNA, 17 nt, Homo sapiens
uccauccuggagaaagg

SEQ ID NO: 3513 - RNA, 17 nt, Homo sapiens
ccauccuggagaaagga

SEQ ID NO: 3514 - RNA, 17 nt, Homo sapiens
auccuggagaaaggaga

SEQ ID NO: 3515 - RNA, 17 nt, Homo sapiens
uggagaaaggagaacgc

SEQ ID NO: 3516 - RNA, 17 nt, Homo sapiens
ggagaaaggagaacgcc

SEQ ID NO: 3517 - RNA, 17 nt, Homo sapiens
agaaaggagaacgccuc

SEQ ID NO: 3518 - RNA, 17 nt, Homo sapiens
guaccaucgaugucuac

SEQ ID NO: 3519 - RNA, 17 nt, Homo sapiens
gucuacaugaucauggu

SEQ ID NO: 3520 - RNA, 17 nt, Homo sapiens
augaucauggucaagug

SEQ ID NO: 3521 - RNA, 17 nt, Homo sapiens
caagugcuggaugauag

SEQ ID NO: 3522 - RNA, 17 nt, Homo sapiens
aagugcuggaugauaga

SEQ ID NO: 3523 - RNA, 17 nt, Homo sapiens
ugcuggaugauagacgc

SEQ ID NO: 3524 - RNA, 17 nt, Homo sapiens
ggaugauagacgcagau

SEQ ID NO: 3525 - RNA, 17 nt, Homo sapiens
uagacgcagauagucgc

SEQ ID NO: 3526 - RNA, 17 nt, Homo sapiens
aguuccgugaguugauc

SEQ ID NO: 3527 - RNA, 17 nt, Homo sapiens
cgugaguugaucaucga

SEQ ID NO: 3528 - RNA, 17 nt, Homo sapiens
ugaucaucgaauucucc

SEQ ID NO: 3529 - RNA, 17 nt, Homo sapiens
uccaaaauggcccgaga

SEQ ID NO: 3530 - RNA, 17 nt, Homo sapiens
aauggcccgagaccccc

SEQ ID NO: 3531 - RNA, 17 nt, Homo sapiens
uggcccgagacccccag

SEQ ID NO: 3532 - RNA, 17 nt, Homo sapiens
gucauucagggggauga

SEQ ID NO: 3533 - RNA, 17 nt, Homo sapiens
ucauucagggggaugaa

SEQ ID NO: 3534 - RNA, 17 nt, Homo sapiens
cauucagggggaugaaa

SEQ ID NO: 3535 - RNA, 17 nt, Homo sapiens
auucagggggaugaaag

SEQ ID NO: 3536 - RNA, 17 nt, Homo sapiens
uucagggggaugaaaga

SEQ ID NO: 3537 - RNA, 17 nt, Homo sapiens
agggggaugaaagaaug

SEQ ID NO: 3538 - RNA, 17 nt, Homo sapiens
ggaugaaagaaugcauu

SEQ ID NO: 3539 - RNA, 17 nt, Homo sapiens
guccuacagacuccaac

SEQ ID NO: 3540 - RNA, 17 nt, Homo sapiens
cgugcccugauggauga

SEQ ID NO: 3541 - RNA, 17 nt, Homo sapiens
gcccugauggaugaaga

SEQ ID NO: 3542 - RNA, 17 nt, Homo sapiens
cccugauggaugaagaa

SEQ ID NO: 3543 - RNA, 17 nt, Homo sapiens
ugauggaugaagaagac

SEQ ID NO: 3544 - RNA, 17 nt, Homo sapiens
uggaugaagaagacaug

SEQ ID NO: 3545 - RNA, 17 nt, Homo sapiens
augaagaagacauggac

SEQ ID NO: 3546 - RNA, 17 nt, Homo sapiens
gaagacauggacgacgu

SEQ ID NO: 3547 - RNA, 17 nt, Homo sapiens
aagacauggacgacgug

SEQ ID NO: 3548 - RNA, 17 nt, Homo sapiens
acauggacgacguggug

SEQ ID NO: 3549 - RNA, 17 nt, Homo sapiens
gacgacgugguggaugc

SEQ ID NO: 3550 - RNA, 17 nt, Homo sapiens
gacgugguggaugccga

SEQ ID NO: 3551 - RNA, 17 nt, Homo sapiens
acgugguggaugccgac

SEQ ID NO: 3552 - RNA, 17 nt, Homo sapiens
uggaugccgacgaguac

SEQ ID NO: 3553 - RNA, 17 nt, Homo sapiens
augccgacgaguaccuc

SEQ ID NO: 3554 - RNA, 17 nt, Homo sapiens
ccacagcagggcuucuu

SEQ ID NO: 3555 - RNA, 17 nt, Homo sapiens
cacagcagggcuucuuc

SEQ ID NO: 3556 - RNA, 17 nt, Homo sapiens
cacgucacggacucccc

SEQ ID NO: 3557 - RNA, 17 nt, Homo sapiens
acgucacggacuccccu

SEQ ID NO: 3558 - RNA, 17 nt, Homo sapiens
ccccuccugagcucucu

SEQ ID NO: 3559 - RNA, 17 nt, Homo sapiens
agcucucugagugcaac

SEQ ID NO: 3560 - RNA, 17 nt, Homo sapiens
uccaccguggcuugcau

SEQ ID NO: 3561 - RNA, 17 nt, Homo sapiens
cuugcauugauagaaau

SEQ ID NO: 3562 - RNA, 17 nt, Homo sapiens
cauugauagaaaugggc

SEQ ID NO: 3563 - RNA, 17 nt, Homo sapiens
auagaaaugggcugcaa

SEQ ID NO: 3564 - RNA, 17 nt, Homo sapiens
uagaaaugggcugcaaa

SEQ ID NO: 3565 - RNA, 17 nt, Homo sapiens
cccaucaaggaagacag

SEQ ID NO: 3566 - RNA, 17 nt, Homo sapiens
ccaucaaggaagacagc

SEQ ID NO: 3567 - RNA, 17 nt, Homo sapiens
ucaaggaagacagcuuc

SEQ ID NO: 3568 - RNA, 17 nt, Homo sapiens
cuugcagcgauacagcu

SEQ ID NO: 3569 - RNA, 17 nt, Homo sapiens
acagcucagaccccaca

SEQ ID NO: 3570 - RNA, 17 nt, Homo sapiens
accccacaggcgccuug

SEQ ID NO: 3571 - RNA, 17 nt, Homo sapiens
ggcgccuugacugagga

SEQ ID NO: 3572 - RNA, 17 nt, Homo sapiens
ccuugacugaggacagc

SEQ ID NO: 3573 - RNA, 17 nt, Homo sapiens
uugacugaggacagcau

SEQ ID NO: 3574 - RNA, 17 nt, Homo sapiens
ugacugaggacagcaua

SEQ ID NO: 3575 - RNA, 17 nt, Homo sapiens
acagcauagacgacacc

SEQ ID NO: 3576 - RNA, 17 nt, Homo sapiens
gcauagacgacaccuuc

SEQ ID NO: 3577 - RNA, 17 nt, Homo sapiens
cagugccugaauacaua

SEQ ID NO: 3578 - RNA, 17 nt, Homo sapiens
ucccaaaaggcccgcug

SEQ ID NO: 3579 - RNA, 17 nt, Homo sapiens
ggcccgcuggcucugug

SEQ ID NO: 3580 - RNA, 17 nt, Homo sapiens
ucugugcagaauccugu

SEQ ID NO: 3581 - RNA, 17 nt, Homo sapiens
cagccucugaaccccgc

SEQ ID NO: 3582 - RNA, 17 nt, Homo sapiens
gcccagcagagacccac

SEQ ID NO: 3583 - RNA, 17 nt, Homo sapiens
ccagcagagacccacac

SEQ ID NO: 3584 - RNA, 17 nt, Homo sapiens
cacuaccaggaccccca

SEQ ID NO: 3585 - RNA, 17 nt, Homo sapiens
acuaccaggacccccac

SEQ ID NO: 3586 - RNA, 17 nt, Homo sapiens
acugcagugggcaaccc

SEQ ID NO: 3587 - RNA, 17 nt, Homo sapiens
cugcagugggcaacccc

SEQ ID NO: 3588 - RNA, 17 nt, Homo sapiens
gcaaccccgaguaucuc

SEQ ID NO: 3589 - RNA, 17 nt, Homo sapiens
gcacauucgacagcccu

SEQ ID NO: 3590 - RNA, 17 nt, Homo sapiens
ugcccacugggcccaga

SEQ ID NO: 3591 - RNA, 17 nt, Homo sapiens
gcccacugggcccagaa

SEQ ID NO: 3592 - RNA, 17 nt, Homo sapiens
ugggcccagaaaggcag

SEQ ID NO: 3593 - RNA, 17 nt, Homo sapiens
cccagaaaggcagccac

SEQ ID NO: 3594 - RNA, 17 nt, Homo sapiens
auuagccuggacaaccc

SEQ ID NO: 3595 - RNA, 17 nt, Homo sapiens
uuagccuggacaacccu

SEQ ID NO: 3596 - RNA, 17 nt, Homo sapiens
acaacccugacuaccag

SEQ ID NO: 3597 - RNA, 17 nt, Homo sapiens
uaccagcaggacuucuu

SEQ ID NO: 3598 - RNA, 17 nt, Homo sapiens
accagcaggacuucuuu

SEQ ID NO: 3599 - RNA, 17 nt, Homo sapiens
uuucccaaggaagccaa

SEQ ID NO: 3600 - RNA, 17 nt, Homo sapiens
uucccaaggaagccaag

SEQ ID NO: 3601 - RNA, 17 nt, Homo sapiens
agccaaauggcaucuuu

SEQ ID NO: 3602 - RNA, 17 nt, Homo sapiens
aucuuuaagggcuccac

SEQ ID NO: 3603 - RNA, 17 nt, Homo sapiens
ucuuuaagggcuccaca

SEQ ID NO: 3604 - RNA, 17 nt, Homo sapiens
ccacagcugaaaaugca

SEQ ID NO: 3605 - RNA, 17 nt, Homo sapiens
aaaaugcagaauaccua

SEQ ID NO: 3606 - RNA, 17 nt, Homo sapiens
auaccuaagggucgcgc

SEQ ID NO: 3607 - RNA, 17 nt, Homo sapiens
uaccuaagggucgcgcc

SEQ ID NO: 3608 - RNA, 17 nt, Homo sapiens
aaagcagugaauuuauu

SEQ ID NO: 3609 - RNA, 17 nt, Homo sapiens
aauuuauuggagcauga

SEQ ID NO: 3610 - RNA, 17 nt, Homo sapiens
auuuauuggagcaugac

SEQ ID NO: 3611 - RNA, 17 nt, Homo sapiens
uggagcaugaccacgga

SEQ ID NO: 3612 - RNA, 17 nt, Homo sapiens
augaccacggaggauag

SEQ ID NO: 3613 - RNA, 17 nt, Homo sapiens
ugaccacggaggauagu

SEQ ID NO: 3614 - RNA, 17 nt, Homo sapiens
accacggaggauaguau

SEQ ID NO: 3615 - RNA, 17 nt, Homo sapiens
ccacggaggauaguaug

SEQ ID NO: 3616 - RNA, 17 nt, Homo sapiens
gauaguaugagcccuaa

SEQ ID NO: 3617 - RNA, 17 nt, Homo sapiens
aaaauccagacucuuuc

SEQ ID NO: 3618 - RNA, 17 nt, Homo sapiens
acucuuucgauacccag

SEQ ID NO: 3619 - RNA, 17 nt, Homo sapiens
gauacccaggaccaagc

SEQ ID NO: 3620 - RNA, 17 nt, Homo sapiens
auacccaggaccaagcc

SEQ ID NO: 3621 - RNA, 17 nt, Homo sapiens
ccacagcagguccucca

SEQ ID NO: 3622 - RNA, 17 nt, Homo sapiens
agcucuuagacccacag

SEQ ID NO: 3623 - RNA, 17 nt, Homo sapiens
gacccacagacugguuu

SEQ ID NO: 3624 - RNA, 17 nt, Homo sapiens
cacagacugguuuugca

SEQ ID NO: 3625 - RNA, 17 nt, Homo sapiens
uuuacaccgacuagcca

SEQ ID NO: 3626 - RNA, 17 nt, Homo sapiens
acuagccaggaaguacu

SEQ ID NO: 3627 - RNA, 17 nt, Homo sapiens
cuagccaggaaguacuu

SEQ ID NO: 3628 - RNA, 17 nt, Homo sapiens
uccaccucgggcacauu

SEQ ID NO: 3629 - RNA, 17 nt, Homo sapiens
ccaccucgggcacauuu

SEQ ID NO: 3630 - RNA, 17 nt, Homo sapiens
cacauuuugggaaguug

SEQ ID NO: 3631 - RNA, 17 nt, Homo sapiens
acauuuugggaaguugc

SEQ ID NO: 3632 - RNA, 17 nt, Homo sapiens
cauuuugggaaguugca

SEQ ID NO: 3633 - RNA, 17 nt, Homo sapiens
caaacugugaagcauuu

SEQ ID NO: 3634 - RNA, 17 nt, Homo sapiens
cauuuacagaaacgcau

SEQ ID NO: 3635 - RNA, 17 nt, Homo sapiens
uccagcaagaauauugu

SEQ ID NO: 3636 - RNA, 17 nt, Homo sapiens
gucccuuugagcagaaa

SEQ ID NO: 3637 - RNA, 17 nt, Homo sapiens
uuugagcagaaauuuau

SEQ ID NO: 3638 - RNA, 17 nt, Homo sapiens
cuuucaaagagguauau

SEQ ID NO: 3639 - RNA, 17 nt, Homo sapiens
uucaaagagguauauuu

SEQ ID NO: 3640 - RNA, 17 nt, Homo sapiens
guauauuugaaaaaaaa

SEQ ID NO: 3641 - RNA, 17 nt, Homo sapiens
guauaugugaggauuuu

SEQ ID NO: 3642 - RNA, 17 nt, Homo sapiens
auaugugaggauuuuua

SEQ ID NO: 3643 - RNA, 17 nt, Homo sapiens
uaugugaggauuuuuau

SEQ ID NO: 3644 - RNA, 17 nt, Homo sapiens
uuuuuauugauugggga

SEQ ID NO: 3645 - RNA, 17 nt, Homo sapiens
uauugauuggggaucuu

SEQ ID NO: 3646 - RNA, 17 nt, Homo sapiens
auugauuggggaucuug

SEQ ID NO: 3647 - RNA, 17 nt, Homo sapiens
uugauuggggaucuugg

SEQ ID NO: 3648 - RNA, 17 nt, Homo sapiens
ugauuggggaucuugga

SEQ ID NO: 3649 - RNA, 17 nt, Homo sapiens
gggaucuuggaguuuuu

SEQ ID NO: 3650 - RNA, 17 nt, Homo sapiens
ggaucuuggaguuuuuc

SEQ ID NO: 3651 - RNA, 17 nt, Homo sapiens
ucgcuauugauuuuuac

SEQ ID NO: 3652 - RNA, 17 nt, Homo sapiens
acuucaaugggcucuuc

SEQ ID NO: 3653 - RNA, 17 nt, Homo sapiens
cuucaaugggcucuucc

SEQ ID NO: 3654 - RNA, 17 nt, Homo sapiens
uccaacaaggaagaagc

SEQ ID NO: 3655 - RNA, 17 nt, Homo sapiens
ccaacaaggaagaagcu

SEQ ID NO: 3656 - RNA, 17 nt, Homo sapiens
acaaggaagaagcuugc

SEQ ID NO: 3657 - RNA, 17 nt, Homo sapiens
agcuugcugguagcacu

SEQ ID NO: 3658 - RNA, 17 nt, Homo sapiens
gcuacccugaguucauc

SEQ ID NO: 3659 - RNA, 17 nt, Homo sapiens
uucauccaggcccaacu

SEQ ID NO: 3660 - RNA, 17 nt, Homo sapiens
ccaacugugagcaagga

SEQ ID NO: 3661 - RNA, 17 nt, Homo sapiens
gugagcaaggagcacaa

SEQ ID NO: 3662 - RNA, 17 nt, Homo sapiens
ugagcaaggagcacaag

SEQ ID NO: 3663 - RNA, 17 nt, Homo sapiens
gucuuccagaggaugcu

SEQ ID NO: 3664 - RNA, 17 nt, Homo sapiens
cuuccagaggaugcuug

SEQ ID NO: 3665 - RNA, 17 nt, Homo sapiens
uuccagaggaugcuuga

SEQ ID NO: 3666 - RNA, 17 nt, Homo sapiens
ggaugcuugauuccagu

SEQ ID NO: 3667 - RNA, 17 nt, Homo sapiens
auuccagugguucugcu

SEQ ID NO: 3668 - RNA, 17 nt, Homo sapiens
ugcuucaaggcuuccac

SEQ ID NO: 3669 - RNA, 17 nt, Homo sapiens
acacuaaagauccaaga

SEQ ID NO: 3670 - RNA, 17 nt, Homo sapiens
agauccaagaaggccuu

SEQ ID NO: 3671 - RNA, 17 nt, Homo sapiens
uccaagaaggccuucau

SEQ ID NO: 3672 - RNA, 17 nt, Homo sapiens
gccuucauggccccagc

SEQ ID NO: 3673 - RNA, 17 nt, Homo sapiens
ccccagcaggccggauc

SEQ ID NO: 3674 - RNA, 17 nt, Homo sapiens
agcaggccggaucggua

SEQ ID NO: 3675 - RNA, 17 nt, Homo sapiens
gcaggccggaucgguac

SEQ ID NO: 3676 - RNA, 17 nt, Homo sapiens
gccggaucgguacugua

SEQ ID NO: 3677 - RNA, 17 nt, Homo sapiens
caagucauggcagguac

SEQ ID NO: 3678 - RNA, 17 nt, Homo sapiens
ucauggcagguacagua

SEQ ID NO: 3679 - RNA, 17 nt, Homo sapiens
guacaguaggauaagcc

SEQ ID NO: 3680 - RNA, 17 nt, Homo sapiens
uacaguaggauaagcca

SEQ ID NO: 3681 - RNA, 17 nt, Homo sapiens
cccuuccugggcaaaga

SEQ ID NO: 3682 - RNA, 17 nt, Homo sapiens
ccuuccugggcaaagaa

SEQ ID NO: 3683 - RNA, 17 nt, Homo sapiens
ugggcaaagaagaaacg

SEQ ID NO: 3684 - RNA, 17 nt, Homo sapiens
gcaaagaagaaacggag

SEQ ID NO: 3685 - RNA, 17 nt, Homo sapiens
gaagaaacggaggggau

SEQ ID NO: 3686 - RNA, 17 nt, Homo sapiens
aagaaacggaggggaug

SEQ ID NO: 3687 - RNA, 17 nt, Homo sapiens
gaaacggaggggaugaa

SEQ ID NO: 3688 - RNA, 17 nt, Homo sapiens
aaacggaggggaugaau

SEQ ID NO: 3689 - RNA, 17 nt, Homo sapiens
aacggaggggaugaauu

SEQ ID NO: 3690 - RNA, 17 nt, Homo sapiens
acggaggggaugaauuc

SEQ ID NO: 3691 - RNA, 17 nt, Homo sapiens
gaggggaugaauucuuc

SEQ ID NO: 3692 - RNA, 17 nt, Homo sapiens
cuuccuuagacuuacuu

SEQ ID NO: 3693 - RNA, 17 nt, Homo sapiens
guccccacgguacuuac

SEQ ID NO: 3694 - RNA, 17 nt, Homo sapiens
uccccacugauggacca

SEQ ID NO: 3695 - RNA, 17 nt, Homo sapiens
ccacugauggaccagug

SEQ ID NO: 3696 - RNA, 17 nt, Homo sapiens
cacugauggaccagugg

SEQ ID NO: 3697 - RNA, 17 nt, Homo sapiens
ggaccagugguuuccag

SEQ ID NO: 3698 - RNA, 17 nt, Homo sapiens
ccagucaugagcguuag

SEQ ID NO: 3699 - RNA, 17 nt, Homo sapiens
gagcguuagacugacuu

SEQ ID NO: 3700 - RNA, 17 nt, Homo sapiens
guuagacugacuuguuu

SEQ ID NO: 3701 - RNA, 17 nt, Homo sapiens
auuguuuugaaacucag

SEQ ID NO: 3702 - RNA, 17 nt, Homo sapiens
gcugucaugaaaucagc

SEQ ID NO: 3703 - RNA, 17 nt, Homo sapiens
aucagcaagagaggaug

SEQ ID NO: 3704 - RNA, 17 nt, Homo sapiens
cagcaagagaggaugac

SEQ ID NO: 3705 - RNA, 17 nt, Homo sapiens
gcaagagaggaugacac

SEQ ID NO: 3706 - RNA, 17 nt, Homo sapiens
caagagaggaugacaca

SEQ ID NO: 3707 - RNA, 17 nt, Homo sapiens
gagaggaugacacauca

SEQ ID NO: 3708 - RNA, 17 nt, Homo sapiens
aauaacucggauuccag

SEQ ID NO: 3709 - RNA, 17 nt, Homo sapiens
auaacucggauuccagc

SEQ ID NO: 3710 - RNA, 17 nt, Homo sapiens
cccacauuggauucauc

SEQ ID NO: 3711 - RNA, 17 nt, Homo sapiens
ccacauuggauucauca

SEQ ID NO: 3712 - RNA, 17 nt, Homo sapiens
cagcauuuggaccaaua

SEQ ID NO: 3713 - RNA, 17 nt, Homo sapiens
agcauuuggaccaauag

SEQ ID NO: 3714 - RNA, 17 nt, Homo sapiens
ccacagcugagaaugug

SEQ ID NO: 3715 - RNA, 17 nt, Homo sapiens
acagcugagaaugugga

SEQ ID NO: 3716 - RNA, 17 nt, Homo sapiens
gagaauguggaauaccu

SEQ ID NO: 3717 - RNA, 17 nt, Homo sapiens
agaauguggaauaccua

SEQ ID NO: 3718 - RNA, 17 nt, Homo sapiens
auaccuaaggauaacac

SEQ ID NO: 3719 - RNA, 17 nt, Homo sapiens
uaccuaaggauaacacc

SEQ ID NO: 3720 - RNA, 17 nt, Homo sapiens
ccuaauuugaggcucag

SEQ ID NO: 3721 - RNA, 17 nt, Homo sapiens
uaauuugaggcucagau

SEQ ID NO: 3722 - RNA, 17 nt, Homo sapiens
gaggcucagaugaaaug

SEQ ID NO: 3723 - RNA, 17 nt, Homo sapiens
gcucagaugaaaugcau

SEQ ID NO: 3724 - RNA, 17 nt, Homo sapiens
augcaucagguccuuug

SEQ ID NO: 3725 - RNA, 17 nt, Homo sapiens
gguccuuuggggcauag

SEQ ID NO: 3726 - RNA, 17 nt, Homo sapiens
guccuuuggggcauaga

SEQ ID NO: 3727 - RNA, 17 nt, Homo sapiens
uccuuuggggcauagau

SEQ ID NO: 3728 - RNA, 17 nt, Homo sapiens
ggggcauagaucagaag

SEQ ID NO: 3729 - RNA, 17 nt, Homo sapiens
auagaucagaagacuac

SEQ ID NO: 3730 - RNA, 17 nt, Homo sapiens
gaucagaagacuacaaa

SEQ ID NO: 3731 - RNA, 17 nt, Homo sapiens
acaaaaaugaagcugcu

SEQ ID NO: 3732 - RNA, 17 nt, Homo sapiens
gcugcucugaaaucucc

SEQ ID NO: 3733 - RNA, 17 nt, Homo sapiens
uuacuuauggaagauag

SEQ ID NO: 3734 - RNA, 17 nt, Homo sapiens
uacuuauggaagauagu

SEQ ID NO: 3735 - RNA, 17 nt, Homo sapiens
uuauggaagauaguuuu

SEQ ID NO: 3736 - RNA, 17 nt, Homo sapiens
uacucaaagaguauaug

SEQ ID NO: 3737 - RNA, 17 nt, Homo sapiens
ucccuccaggucagcug

SEQ ID NO: 3738 - RNA, 17 nt, Homo sapiens
ucugccuugagucaucu

SEQ ID NO: 3739 - RNA, 17 nt, Homo sapiens
acagcucuggccacaac

SEQ ID NO: 3740 - RNA, 17 nt, Homo sapiens
ccacaacagggcauuuu

SEQ ID NO: 3741 - RNA, 17 nt, Homo sapiens
cacaacagggcauuuua

SEQ ID NO: 3742 - RNA, 17 nt, Homo sapiens
auuuuacaggugcgaau

SEQ ID NO: 3743 - RNA, 17 nt, Homo sapiens
acaggugcgaaugacag

SEQ ID NO: 3744 - RNA, 17 nt, Homo sapiens
gugcgaaugacaguagc

SEQ ID NO: 3745 - RNA, 17 nt, Homo sapiens
agcauuaugaguagugu

SEQ ID NO: 3746 - RNA, 17 nt, Homo sapiens
aguagugugaauucagg

SEQ ID NO: 3747 - RNA, 17 nt, Homo sapiens
ugaauucagguaguaaa

SEQ ID NO: 3748 - RNA, 17 nt, Homo sapiens
guaaauaugaaacuagg

SEQ ID NO: 3749 - RNA, 17 nt, Homo sapiens
ugaaacuaggguuugaa

SEQ ID NO: 3750 - RNA, 17 nt, Homo sapiens
gaaacuaggguuugaaa

SEQ ID NO: 3751 - RNA, 17 nt, Homo sapiens
uaggguuugaaauugau

SEQ ID NO: 3752 - RNA, 17 nt, Homo sapiens
uugaaauugauaaugcu

SEQ ID NO: 3753 - RNA, 17 nt, Homo sapiens
cauuugcagauguuuua

SEQ ID NO: 3754 - RNA, 17 nt, Homo sapiens
auguuuuagaaggaaaa

SEQ ID NO: 3755 - RNA, 17 nt, Homo sapiens
uuuuagaaggaaaaaag

SEQ ID NO: 3756 - RNA, 17 nt, Homo sapiens
uuuagaaggaaaaaagu

SEQ ID NO: 3757 - RNA, 17 nt, Homo sapiens
cuacaauuggaagauug

SEQ ID NO: 3758 - RNA, 17 nt, Homo sapiens
uacaauuggaagauugg

SEQ ID NO: 3759 - RNA, 17 nt, Homo sapiens
aauuggaagauuggaag

SEQ ID NO: 3760 - RNA, 17 nt, Homo sapiens
ggaagauuggaagauuc

SEQ ID NO: 3761 - RNA, 17 nt, Homo sapiens
gaagauuggaagauuca

SEQ ID NO: 3762 - RNA, 17 nt, Homo sapiens
gauuggaagauucagcu

SEQ ID NO: 3763 - RNA, 17 nt, Homo sapiens
gcuaguuaggagcccau

SEQ ID NO: 3764 - RNA, 17 nt, Homo sapiens
cuaguuaggagcccauu

SEQ ID NO: 3765 - RNA, 17 nt, Homo sapiens
uguaaccugacugguua

SEQ ID NO: 3766 - RNA, 17 nt, Homo sapiens
accugacugguuaacag

SEQ ID NO: 3767 - RNA, 17 nt, Homo sapiens
uuuaucaaggaagaaau

SEQ ID NO: 3768 - RNA, 17 nt, Homo sapiens
uuaucaaggaagaaaug

SEQ ID NO: 3769 - RNA, 17 nt, Homo sapiens
ucaaggaagaaaugguu

SEQ ID NO: 3770 - RNA, 17 nt, Homo sapiens
gaagaaaugguucagaa

SEQ ID NO: 3771 - RNA, 17 nt, Homo sapiens
augguucagaaaauauu

SEQ ID NO: 3772 - RNA, 17 nt, Homo sapiens
uaauuuuugacucccag

SEQ ID NO: 3773 - RNA, 17 nt, Homo sapiens
gacucccagaucaguca

SEQ ID NO: 3774 - RNA, 17 nt, Homo sapiens
aucagucagagccccua

SEQ ID NO: 3775 - RNA, 17 nt, Homo sapiens
auuguuaagaaaguauu

SEQ ID NO: 3776 - RNA, 17 nt, Homo sapiens
aaguauuugauuuuugu

SEQ ID NO: 3777 - RNA, 17 nt, Homo sapiens
gucucaaugaaaauaaa

SEQ ID NO: 3778 - RNA, 38 nt, Artificial Sequence
  Description of Artificial Sequence:  Enzymatic Nucleic acid
uagcucggcugaugaggccguuaggccgaaacuccggc

SEQ ID NO: 3779 - RNA, 38 nt, Artificial Sequence
  Description of Artificial Sequence:  Enzymatic Nucleic acid
gccggggccugaugaggccguuaggccgaaagcucggg

SEQ ID NO: 3780 - RNA, 38 nt, Artificial Sequence
  Description of Artificial Sequence:  Enzymatic Nucleic acid
acgccgaccugaugaggccguuaggccgaaagguggcc

SEQ ID NO: 3781 - RNA, 38 nt, Artificial Sequence
  Description of Artificial Sequence:  Enzymatic Nucleic acid
cggacgcccugaugaggccguuaggccgaaacgaggug

SEQ ID NO: 3782 - RNA, 38 nt, Artificial Sequence
  Description of Artificial Sequence:  Enzymatic Nucleic acid
cucgggcgcugaugaggccguuaggccgaaacgccgac

SEQ ID NO: 3783 - RNA, 38 nt, Artificial Sequence
  Description of Artificial Sequence:  Enzymatic Nucleic acid
gaggcgggcugaugaggccguuaggccgaaacucgggc

SEQ ID NO: 3784 - RNA, 38 nt, Artificial Sequence
  Description of Artificial Sequence:  Enzymatic Nucleic acid
uuggcggccugaugaggccguuaggccgaaaggcgggg

SEQ ID NO: 3785 - RNA, 38 nt, Artificial Sequence
  Description of Artificial Sequence:  Enzymatic Nucleic acid
acuggacgcugaugaggccguuaggccgaaagucaggg

SEQ ID NO: 3786 - RNA, 38 nt, Artificial Sequence
  Description of Artificial Sequence:  Enzymatic Nucleic acid
caauacugcugaugaggccguuaggccgaaacggaguc

SEQ ID NO: 3787 - RNA, 38 nt, Artificial Sequence
  Description of Artificial Sequence:  Enzymatic Nucleic acid
ccgaucaacugaugaggccguuaggccgaaacuggacg

SEQ ID NO: 3788 - RNA, 38 nt, Artificial Sequence
  Description of Artificial Sequence:  Enzymatic Nucleic acid
ucccgauccugaugaggccguuaggccgaaauacugga

SEQ ID NO: 3789 - RNA, 38 nt, Artificial Sequence
  Description of Artificial Sequence:  Enzymatic Nucleic acid
gcucuccccugaugaggccguuaggccgaaaucaauac

SEQ ID NO: 3790 - RNA, 38 nt, Artificial Sequence
  Description of Artificial Sequence:  Enzymatic Nucleic acid
uccccgaacugaugaggccguuaggccgaaagcucgcu

SEQ ID NO: 3791 - RNA, 38 nt, Artificial Sequence
  Description of Artificial Sequence:  Enzymatic Nucleic acid
gcuccccgcugaugaggccguuaggccgaaagagcucg

SEQ ID NO: 3792 - RNA, 38 nt, Artificial Sequence
  Description of Artificial Sequence:  Enzymatic Nucleic acid
ugcucccccugaugaggccguuaggccgaaaagagcuc

SEQ ID NO: 3793 - RNA, 38 nt, Artificial Sequence
  Description of Artificial Sequence:  Enzymatic Nucleic acid
ccgucccgcugaugaggccguuaggccgaaagggucgc

SEQ ID NO: 3794 - RNA, 38 nt, Artificial Sequence
  Description of Artificial Sequence:  Enzymatic Nucleic acid
agcgccagcugaugaggccguuaggccgaaagcgcugc

SEQ ID NO: 3795 - RNA, 38 nt, Artificial Sequence
  Description of Artificial Sequence:  Enzymatic Nucleic acid
gccgggcacugaugaggccguuaggccgaaagcgcagc

SEQ ID NO: 3796 - RNA, 38 nt, Artificial Sequence
  Description of Artificial Sequence:  Enzymatic Nucleic acid
cagagccccugaugaggccguuaggccgaaacucgccg

SEQ ID NO: 3797 - RNA, 38 nt, Artificial Sequence
  Description of Artificial Sequence:  Enzymatic Nucleic acid
uuccuccacugaugaggccguuaggccgaaagcccgac

SEQ ID NO: 3798 - RNA, 38 nt, Artificial Sequence
  Description of Artificial Sequence:  Enzymatic Nucleic acid
ccuuggcacugaugaggccguuaggccgaaacuuucuu

SEQ ID NO: 3799 - RNA, 38 nt, Artificial Sequence
  Description of Artificial Sequence:  Enzymatic Nucleic acid
gccuuggccugaugaggccguuaggccgaaaacuuucu

SEQ ID NO: 3800 - RNA, 38 nt, Artificial Sequence
  Description of Artificial Sequence:  Enzymatic Nucleic acid
gagcuugucugaugaggccguuaggccgaaacucgugc

SEQ ID NO: 3801 - RNA, 38 nt, Artificial Sequence
  Description of Artificial Sequence:  Enzymatic Nucleic acid
aacugcgucugaugaggccguuaggccgaaagcuuguu

SEQ ID NO: 3802 - RNA, 38 nt, Artificial Sequence
  Description of Artificial Sequence:  Enzymatic Nucleic acid
aagugccccugaugaggccguuaggccgaaacugcgug

SEQ ID NO: 3803 - RNA, 38 nt, Artificial Sequence
  Description of Artificial Sequence:  Enzymatic Nucleic acid
aucuucaacugaugaggccguuaggccgaaagugccca

SEQ ID NO: 3804 - RNA, 38 nt, Artificial Sequence
  Description of Artificial Sequence:  Enzymatic Nucleic acid
gaucuucacugaugaggccguuaggccgaaaagugccc

SEQ ID NO: 3805 - RNA, 38 nt, Artificial Sequence
  Description of Artificial Sequence:  Enzymatic Nucleic acid
ugaucuuccugaugaggccguuaggccgaaaaagugcc

SEQ ID NO: 3806 - RNA, 38 nt, Artificial Sequence
  Description of Artificial Sequence:  Enzymatic Nucleic acid
gagaaaaucugaugaggccguuaggccgaaaucuucaa

SEQ ID NO: 3807 - RNA, 38 nt, Artificial Sequence
  Description of Artificial Sequence:  Enzymatic Nucleic acid
gcugagaacugaugaggccguuaggccgaaaugaucuu

SEQ ID NO: 3808 - RNA, 38 nt, Artificial Sequence
  Description of Artificial Sequence:  Enzymatic Nucleic acid
ggcugagacugaugaggccguuaggccgaaaaugaucu

SEQ ID NO: 3809 - RNA, 38 nt, Artificial Sequence
  Description of Artificial Sequence:  Enzymatic Nucleic acid
aggcugagcugaugaggccguuaggccgaaaaaugauc

SEQ ID NO: 3810 - RNA, 38 nt, Artificial Sequence
  Description of Artificial Sequence:  Enzymatic Nucleic acid
gaggcugacugaugaggccguuaggccgaaaaaaugau

SEQ ID NO: 3811 - RNA, 38 nt, Artificial Sequence
  Description of Artificial Sequence:  Enzymatic Nucleic acid
uggaggcucugaugaggccguuaggccgaaagaaaaug

SEQ ID NO: 3812 - RNA, 38 nt, Artificial Sequence
  Description of Artificial Sequence:  Enzymatic Nucleic acid
auccucugcugaugaggccguuaggccgaaaggcugag

SEQ ID NO: 3813 - RNA, 38 nt, Artificial Sequence
  Description of Artificial Sequence:  Enzymatic Nucleic acid
aguuauugcugaugaggccguuaggccgaaacauccuc

SEQ ID NO: 3814 - RNA, 38 nt, Artificial Sequence
  Description of Artificial Sequence:  Enzymatic Nucleic acid
caguuauucugaugaggccguuaggccgaaaacauccu

SEQ ID NO: 3815 - RNA, 38 nt, Artificial Sequence
  Description of Artificial Sequence:  Enzymatic Nucleic acid
cucacagucugaugaggccguuaggccgaaauugaaca

SEQ ID NO: 3816 - RNA, 38 nt, Artificial Sequence
  Description of Artificial Sequence:  Enzymatic Nucleic acid
uucccaagcugaugaggccguuaggccgaaaccaccuc

SEQ ID NO: 3817 - RNA, 38 nt, Artificial Sequence
  Description of Artificial Sequence:  Enzymatic Nucleic acid
aaauuccccugaugaggccguuaggccgaaaggaccac

SEQ ID NO: 3818 - RNA, 38 nt, Artificial Sequence
  Description of Artificial Sequence:  Enzymatic Nucleic acid
aauuuccacugaugaggccguuaggccgaaauucccaa

SEQ ID NO: 3819 - RNA, 38 nt, Artificial Sequence
  Description of Artificial Sequence:  Enzymatic Nucleic acid
uaauuucccugaugaggccguuaggccgaaaauuccca

SEQ ID NO: 3820 - RNA, 38 nt, Artificial Sequence
  Description of Artificial Sequence:  Enzymatic Nucleic acid
acauaggucugaugaggccguuaggccgaaauuuccaa

SEQ ID NO: 3821 - RNA, 38 nt, Artificial Sequence
  Description of Artificial Sequence:  Enzymatic Nucleic acid
cacauaggcugaugaggccguuaggccgaaaauuucca

SEQ ID NO: 3822 - RNA, 38 nt, Artificial Sequence
  Description of Artificial Sequence:  Enzymatic Nucleic acid
ucugcacacugaugaggccguuaggccgaaagguaauu

SEQ ID NO: 3823 - RNA, 38 nt, Artificial Sequence
  Description of Artificial Sequence:  Enzymatic Nucleic acid
aagaucaucugaugaggccguuaggccgaaauuccucu

SEQ ID NO: 3824 - RNA, 38 nt, Artificial Sequence
  Description of Artificial Sequence:  Enzymatic Nucleic acid
aaagaucacugaugaggccguuaggccgaaaauuccuc

SEQ ID NO: 3825 - RNA, 38 nt, Artificial Sequence
  Description of Artificial Sequence:  Enzymatic Nucleic acid
gaaggaaacugaugaggccguuaggccgaaaucauaau

SEQ ID NO: 3826 - RNA, 38 nt, Artificial Sequence
  Description of Artificial Sequence:  Enzymatic Nucleic acid
aagaaggacugaugaggccguuaggccgaaagaucaua

SEQ ID NO: 3827 - RNA, 38 nt, Artificial Sequence
  Description of Artificial Sequence:  Enzymatic Nucleic acid
uaagaaggcugaugaggccguuaggccgaaaagaucau

SEQ ID NO: 3828 - RNA, 38 nt, Artificial Sequence
  Description of Artificial Sequence:  Enzymatic Nucleic acid
uuaagaagcugaugaggccguuaggccgaaaaagauca

SEQ ID NO: 3829 - RNA, 38 nt, Artificial Sequence
  Description of Artificial Sequence:  Enzymatic Nucleic acid
ucuuuaagcugaugaggccguuaggccgaaaggaaaga

SEQ ID NO: 3830 - RNA, 38 nt, Artificial Sequence
  Description of Artificial Sequence:  Enzymatic Nucleic acid
gucuuuaacugaugaggccguuaggccgaaaaggaaag

SEQ ID NO: 3831 - RNA, 38 nt, Artificial Sequence
  Description of Artificial Sequence:  Enzymatic Nucleic acid
uggucuuucugaugaggccguuaggccgaaagaaggaa

SEQ ID NO: 3832 - RNA, 38 nt, Artificial Sequence
  Description of Artificial Sequence:  Enzymatic Nucleic acid
auggucuucugaugaggccguuaggccgaaaagaagga

SEQ ID NO: 3833 - RNA, 38 nt, Artificial Sequence
  Description of Artificial Sequence:  Enzymatic Nucleic acid
accuccugcugaugaggccguuaggccgaaauggucuu

SEQ ID NO: 3834 - RNA, 38 nt, Artificial Sequence
  Description of Artificial Sequence:  Enzymatic Nucleic acid
gaggacaucugaugaggccguuaggccgaaaccagcca

SEQ ID NO: 3835 - RNA, 38 nt, Artificial Sequence
  Description of Artificial Sequence:  Enzymatic Nucleic acid
ugaggacacugaugaggccguuaggccgaaaaccagcc

SEQ ID NO: 3836 - RNA, 38 nt, Artificial Sequence
  Description of Artificial Sequence:  Enzymatic Nucleic acid
gcaaugagcugaugaggccguuaggccgaaacauaacc

SEQ ID NO: 3837 - RNA, 38 nt, Artificial Sequence
  Description of Artificial Sequence:  Enzymatic Nucleic acid
agggcaaucugaugaggccguuaggccgaaaggacaua

SEQ ID NO: 3838 - RNA, 38 nt, Artificial Sequence
  Description of Artificial Sequence:  Enzymatic Nucleic acid
uugagggccugaugaggccguuaggccgaaaugaggac

SEQ ID NO: 3839 - RNA, 38 nt, Artificial Sequence
  Description of Artificial Sequence:  Enzymatic Nucleic acid
acuguguucugaugaggccguuaggccgaaagggcaau

SEQ ID NO: 3840 - RNA, 38 nt, Artificial Sequence
  Description of Artificial Sequence:  Enzymatic Nucleic acid
uccaaaggcugaugaggccguuaggccgaaauucgcuc

SEQ ID NO: 3841 - RNA, 38 nt, Artificial Sequence
  Description of Artificial Sequence:  Enzymatic Nucleic acid
uuccaaagcugaugaggccguuaggccgaaaauucgcu

SEQ ID NO: 3842 - RNA, 38 nt, Artificial Sequence
  Description of Artificial Sequence:  Enzymatic Nucleic acid
guuuuccacugaugaggccguuaggccgaaaggaauuc

SEQ ID NO: 3843 - RNA, 38 nt, Artificial Sequence
  Description of Artificial Sequence:  Enzymatic Nucleic acid
gguuuucccugaugaggccguuaggccgaaaaggaauu

SEQ ID NO: 3844 - RNA, 38 nt, Artificial Sequence
  Description of Artificial Sequence:  Enzymatic Nucleic acid
ccucugaucugaugaggccguuaggccgaaaucugcag

SEQ ID NO: 3845 - RNA, 38 nt, Artificial Sequence
  Description of Artificial Sequence:  Enzymatic Nucleic acid
uuuccucucugaugaggccguuaggccgaaaugaucug

SEQ ID NO: 3846 - RNA, 38 nt, Artificial Sequence
  Description of Artificial Sequence:  Enzymatic Nucleic acid
guaguacacugaugaggccguuaggccgaaauuuccuc

SEQ ID NO: 3847 - RNA, 38 nt, Artificial Sequence
  Description of Artificial Sequence:  Enzymatic Nucleic acid
uuucguagcugaugaggccguuaggccgaaacauauuu

SEQ ID NO: 3848 - RNA, 38 nt, Artificial Sequence
  Description of Artificial Sequence:  Enzymatic Nucleic acid
aauuuucgcugaugaggccguuaggccgaaaguacaua

SEQ ID NO: 3849 - RNA, 38 nt, Artificial Sequence
  Description of Artificial Sequence:  Enzymatic Nucleic acid
ggcauaggcugaugaggccguuaggccgaaauuuucgu

SEQ ID NO: 3850 - RNA, 38 nt, Artificial Sequence
  Description of Artificial Sequence:  Enzymatic Nucleic acid
aggcauagcugaugaggccguuaggccgaaaauuuucg

SEQ ID NO: 3851 - RNA, 38 nt, Artificial Sequence
  Description of Artificial Sequence:  Enzymatic Nucleic acid
cuaaggcacugaugaggccguuaggccgaaaggaauuu

SEQ ID NO: 3852 - RNA, 38 nt, Artificial Sequence
  Description of Artificial Sequence:  Enzymatic Nucleic acid
agacugcucugaugaggccguuaggccgaaaggcauag

SEQ ID NO: 3853 - RNA, 38 nt, Artificial Sequence
  Description of Artificial Sequence:  Enzymatic Nucleic acid
aagacugccugaugaggccguuaggccgaaaaggcaua

SEQ ID NO: 3854 - RNA, 38 nt, Artificial Sequence
  Description of Artificial Sequence:  Enzymatic Nucleic acid
uuagauaacugaugaggccguuaggccgaaacugcuaa

SEQ ID NO: 3855 - RNA, 38 nt, Artificial Sequence
  Description of Artificial Sequence:  Enzymatic Nucleic acid
aguuagaucugaugaggccguuaggccgaaagacugcu

SEQ ID NO: 3856 - RNA, 38 nt, Artificial Sequence
  Description of Artificial Sequence:  Enzymatic Nucleic acid
uaguuagacugaugaggccguuaggccgaaaagacugc

SEQ ID NO: 3857 - RNA, 38 nt, Artificial Sequence
  Description of Artificial Sequence:  Enzymatic Nucleic acid
cauaguuacugaugaggccguuaggccgaaauaagacu

SEQ ID NO: 3858 - RNA, 38 nt, Artificial Sequence
  Description of Artificial Sequence:  Enzymatic Nucleic acid
aucauagucugaugaggccguuaggccgaaagauaaga

SEQ ID NO: 3859 - RNA, 38 nt, Artificial Sequence
  Description of Artificial Sequence:  Enzymatic Nucleic acid
uugcaucacugaugaggccguuaggccgaaaguuagau

SEQ ID NO: 3860 - RNA, 38 nt, Artificial Sequence
  Description of Artificial Sequence:  Enzymatic Nucleic acid
uccgguuucugaugaggccguuaggccgaaauuugcau

SEQ ID NO: 3861 - RNA, 38 nt, Artificial Sequence
  Description of Artificial Sequence:  Enzymatic Nucleic acid
uuccuguacugaugaggccguuaggccgaaauuucuca

SEQ ID NO: 3862 - RNA, 38 nt, Artificial Sequence
  Description of Artificial Sequence:  Enzymatic Nucleic acid
uuuccugucugaugaggccguuaggccgaaaauuucuc

SEQ ID NO: 3863 - RNA, 38 nt, Artificial Sequence
  Description of Artificial Sequence:  Enzymatic Nucleic acid
auuuccugcugaugaggccguuaggccgaaaaauuucu

SEQ ID NO: 3864 - RNA, 38 nt, Artificial Sequence
  Description of Artificial Sequence:  Enzymatic Nucleic acid
ccaugcagcugaugaggccguuaggccgaaauuuccug

SEQ ID NO: 3865 - RNA, 38 nt, Artificial Sequence
  Description of Artificial Sequence:  Enzymatic Nucleic acid
uguugcugcugaugaggccguuaggccgaaaccgcacg

SEQ ID NO: 3866 - RNA, 38 nt, Artificial Sequence
  Description of Artificial Sequence:  Enzymatic Nucleic acid
uuguugcucugaugaggccguuaggccgaaaaccgcac

SEQ ID NO: 3867 - RNA, 38 nt, Artificial Sequence
  Description of Artificial Sequence:  Enzymatic Nucleic acid
cgccacugcugaugaggccguuaggccgaaaugcucuc

SEQ ID NO: 3868 - RNA, 38 nt, Artificial Sequence
  Description of Artificial Sequence:  Enzymatic Nucleic acid
cugcugaccugaugaggccguuaggccgaaaugucccg

SEQ ID NO: 3869 - RNA, 38 nt, Artificial Sequence
  Description of Artificial Sequence:  Enzymatic Nucleic acid
ucacugcucugaugaggccguuaggccgaaacuauguc

SEQ ID NO: 3870 - RNA, 38 nt, Artificial Sequence
  Description of Artificial Sequence:  Enzymatic Nucleic acid
ugcugagacugaugaggccguuaggccgaaagucacug

SEQ ID NO: 3871 - RNA, 38 nt, Artificial Sequence
  Description of Artificial Sequence:  Enzymatic Nucleic acid
uugcugagcugaugaggccguuaggccgaaaagucacu

SEQ ID NO: 3872 - RNA, 38 nt, Artificial Sequence
  Description of Artificial Sequence:  Enzymatic Nucleic acid
guugcugacugaugaggccguuaggccgaaaaagucac

SEQ ID NO: 3873 - RNA, 38 nt, Artificial Sequence
  Description of Artificial Sequence:  Enzymatic Nucleic acid
auguugcucugaugaggccguuaggccgaaagaaaguc

SEQ ID NO: 3874 - RNA, 38 nt, Artificial Sequence
  Description of Artificial Sequence:  Enzymatic Nucleic acid
aguccauccugaugaggccguuaggccgaaacauguug

SEQ ID NO: 3875 - RNA, 38 nt, Artificial Sequence
  Description of Artificial Sequence:  Enzymatic Nucleic acid
gguucuggcugaugaggccguuaggccgaaaguccauc

SEQ ID NO: 3876 - RNA, 38 nt, Artificial Sequence
  Description of Artificial Sequence:  Enzymatic Nucleic acid
ugguucugcugaugaggccguuaggccgaaaaguccau

SEQ ID NO: 3877 - RNA, 38 nt, Artificial Sequence
  Description of Artificial Sequence:  Enzymatic Nucleic acid
acagcuugcugaugaggccguuaggccgaaaucacacu

SEQ ID NO: 3878 - RNA, 38 nt, Artificial Sequence
  Description of Artificial Sequence:  Enzymatic Nucleic acid
cccauuggcugaugaggccguuaggccgaaacagcuug

SEQ ID NO: 3879 - RNA, 38 nt, Artificial Sequence
  Description of Artificial Sequence:  Enzymatic Nucleic acid
gcacagaucugaugaggccguuaggccgaaauuuuggu

SEQ ID NO: 3880 - RNA, 38 nt, Artificial Sequence
  Description of Artificial Sequence:  Enzymatic Nucleic acid
ugggcacacugaugaggccguuaggccgaaaugauuuu

SEQ ID NO: 3881 - RNA, 38 nt, Artificial Sequence
  Description of Artificial Sequence:  Enzymatic Nucleic acid
agcgcccgcugaugaggccguuaggccgaaagcacugc

SEQ ID NO: 3882 - RNA, 38 nt, Artificial Sequence
  Description of Artificial Sequence:  Enzymatic Nucleic acid
cacuggggcugaugaggccguuaggccgaaacuugcca

SEQ ID NO: 3883 - RNA, 38 nt, Artificial Sequence
  Description of Artificial Sequence:  Enzymatic Nucleic acid
uugcggcacugaugaggccguuaggccgaaaccaggca

SEQ ID NO: 3884 - RNA, 38 nt, Artificial Sequence
  Description of Artificial Sequence:  Enzymatic Nucleic acid
cgucucggcugaugaggccguuaggccgaaauuugcgg

SEQ ID NO: 3885 - RNA, 38 nt, Artificial Sequence
  Description of Artificial Sequence:  Enzymatic Nucleic acid
ucgucucgcugaugaggccguuaggccgaaaauuugcg

SEQ ID NO: 3886 - RNA, 38 nt, Artificial Sequence
  Description of Artificial Sequence:  Enzymatic Nucleic acid
uagagcaucugaugaggccguuaggccgaaaguggggg

SEQ ID NO: 3887 - RNA, 38 nt, Artificial Sequence
  Description of Artificial Sequence:  Enzymatic Nucleic acid
ggguuguacugaugaggccguuaggccgaaagcaugag

SEQ ID NO: 3888 - RNA, 38 nt, Artificial Sequence
  Description of Artificial Sequence:  Enzymatic Nucleic acid
ugggguugcugaugaggccguuaggccgaaagagcaug

SEQ ID NO: 3889 - RNA, 38 nt, Artificial Sequence
  Description of Artificial Sequence:  Enzymatic Nucleic acid
ccaucuggcugaugaggccguuaggccgaaacguggug

SEQ ID NO: 3890 - RNA, 38 nt, Artificial Sequence
  Description of Artificial Sequence:  Enzymatic Nucleic acid
caaagcugcugaugaggccguuaggccgaaauuugccc

SEQ ID NO: 3891 - RNA, 38 nt, Artificial Sequence
  Description of Artificial Sequence:  Enzymatic Nucleic acid
uggcaccacugaugaggccguuaggccgaaagcuguau

SEQ ID NO: 3892 - RNA, 38 nt, Artificial Sequence
  Description of Artificial Sequence:  Enzymatic Nucleic acid
guggcacccugaugaggccguuaggccgaaaagcugua

SEQ ID NO: 3893 - RNA, 38 nt, Artificial Sequence
  Description of Artificial Sequence:  Enzymatic Nucleic acid
auuacgggcugaugaggccguuaggccgaaacacuucu

SEQ ID NO: 3894 - RNA, 38 nt, Artificial Sequence
  Description of Artificial Sequence:  Enzymatic Nucleic acid
cacauaaucugaugaggccguuaggccgaaacggggac

SEQ ID NO: 3895 - RNA, 38 nt, Artificial Sequence
  Description of Artificial Sequence:  Enzymatic Nucleic acid
caccacaucugaugaggccguuaggccgaaauuacggg

SEQ ID NO: 3896 - RNA, 38 nt, Artificial Sequence
  Description of Artificial Sequence:  Enzymatic Nucleic acid
ucaccacacugaugaggccguuaggccgaaaauuacgg

SEQ ID NO: 3897 - RNA, 38 nt, Artificial Sequence
  Description of Artificial Sequence:  Enzymatic Nucleic acid
cgagccgucugaugaggccguuaggccgaaaucuguca

SEQ ID NO: 3898 - RNA, 38 nt, Artificial Sequence
  Description of Artificial Sequence:  Enzymatic Nucleic acid
ggacgcaccugaugaggccguuaggccgaaagccguga

SEQ ID NO: 3899 - RNA, 38 nt, Artificial Sequence
  Description of Artificial Sequence:  Enzymatic Nucleic acid
caggcucgcugaugaggccguuaggccgaaacgcacga

SEQ ID NO: 3900 - RNA, 38 nt, Artificial Sequence
  Description of Artificial Sequence:  Enzymatic Nucleic acid
ccaucucacugaugaggccguuaggccgaaagcugucg

SEQ ID NO: 3901 - RNA, 38 nt, Artificial Sequence
  Description of Artificial Sequence:  Enzymatic Nucleic acid
cacuugcgcugaugaggccguuaggccgaaacgccguc

SEQ ID NO: 3902 - RNA, 38 nt, Artificial Sequence
  Description of Artificial Sequence:  Enzymatic Nucleic acid
gcacuucucugaugaggccguuaggccgaaacacuugc

SEQ ID NO: 3903 - RNA, 38 nt, Artificial Sequence
  Description of Artificial Sequence:  Enzymatic Nucleic acid
uuugcggccugaugaggccguuaggccgaaaggcccuu

SEQ ID NO: 3904 - RNA, 38 nt, Artificial Sequence
  Description of Artificial Sequence:  Enzymatic Nucleic acid
uauuccgucugaugaggccguuaggccgaaacacacuu

SEQ ID NO: 3905 - RNA, 38 nt, Artificial Sequence
  Description of Artificial Sequence:  Enzymatic Nucleic acid
ccaauacccugaugaggccguuaggccgaaauuccguu

SEQ ID NO: 3906 - RNA, 38 nt, Artificial Sequence
  Description of Artificial Sequence:  Enzymatic Nucleic acid
uucaccaacugaugaggccguuaggccgaaaccuauuc

SEQ ID NO: 3907 - RNA, 38 nt, Artificial Sequence
  Description of Artificial Sequence:  Enzymatic Nucleic acid
aauucacccugaugaggccguuaggccgaaauaccuau

SEQ ID NO: 3908 - RNA, 38 nt, Artificial Sequence
  Description of Artificial Sequence:  Enzymatic Nucleic acid
agucuuuacugaugaggccguuaggccgaaauucacca

SEQ ID NO: 3909 - RNA, 38 nt, Artificial Sequence
  Description of Artificial Sequence:  Enzymatic Nucleic acid
gagucuuucugaugaggccguuaggccgaaaauucacc

SEQ ID NO: 3910 - RNA, 38 nt, Artificial Sequence
  Description of Artificial Sequence:  Enzymatic Nucleic acid
ugagucuucugaugaggccguuaggccgaaaaauucac

SEQ ID NO: 3911 - RNA, 38 nt, Artificial Sequence
  Description of Artificial Sequence:  Enzymatic Nucleic acid
uggagagucugaugaggccguuaggccgaaagucuuua

SEQ ID NO: 3912 - RNA, 38 nt, Artificial Sequence
  Description of Artificial Sequence:  Enzymatic Nucleic acid
uuuauggacugaugaggccguuaggccgaaagugaguc

SEQ ID NO: 3913 - RNA, 38 nt, Artificial Sequence
  Description of Artificial Sequence:  Enzymatic Nucleic acid
cauuuaugcugaugaggccguuaggccgaaagagugag

SEQ ID NO: 3914 - RNA, 38 nt, Artificial Sequence
  Description of Artificial Sequence:  Enzymatic Nucleic acid
guagcauucugaugaggccguuaggccgaaauggagag

SEQ ID NO: 3915 - RNA, 38 nt, Artificial Sequence
  Description of Artificial Sequence:  Enzymatic Nucleic acid
aauauucgcugaugaggccguuaggccgaaagcauuua

SEQ ID NO: 3916 - RNA, 38 nt, Artificial Sequence
  Description of Artificial Sequence:  Enzymatic Nucleic acid
guguuuaacugaugaggccguuaggccgaaauucguag

SEQ ID NO: 3917 - RNA, 38 nt, Artificial Sequence
  Description of Artificial Sequence:  Enzymatic Nucleic acid
aaguguuucugaugaggccguuaggccgaaauauucgu

SEQ ID NO: 3918 - RNA, 38 nt, Artificial Sequence
  Description of Artificial Sequence:  Enzymatic Nucleic acid
gaaguguucugaugaggccguuaggccgaaaauauucg

SEQ ID NO: 3919 - RNA, 38 nt, Artificial Sequence
  Description of Artificial Sequence:  Enzymatic Nucleic acid
aguuuuugcugaugaggccguuaggccgaaaguguuua

SEQ ID NO: 3920 - RNA, 38 nt, Artificial Sequence
  Description of Artificial Sequence:  Enzymatic Nucleic acid
caguuuuucugaugaggccguuaggccgaaaaguguuu

SEQ ID NO: 3921 - RNA, 38 nt, Artificial Sequence
  Description of Artificial Sequence:  Enzymatic Nucleic acid
cacugaugcugaugaggccguuaggccgaaaggugcag

SEQ ID NO: 3922 - RNA, 38 nt, Artificial Sequence
  Description of Artificial Sequence:  Enzymatic Nucleic acid
ucgccacucugaugaggccguuaggccgaaauggaggu

SEQ ID NO: 3923 - RNA, 38 nt, Artificial Sequence
  Description of Artificial Sequence:  Enzymatic Nucleic acid
gauguggacugaugaggccguuaggccgaaaucgccac

SEQ ID NO: 3924 - RNA, 38 nt, Artificial Sequence
  Description of Artificial Sequence:  Enzymatic Nucleic acid
aggaugugcugaugaggccguuaggccgaaagaucgcc

SEQ ID NO: 3925 - RNA, 38 nt, Artificial Sequence
  Description of Artificial Sequence:  Enzymatic Nucleic acid
accggcagcugaugaggccguuaggccgaaauguggag

SEQ ID NO: 3926 - RNA, 38 nt, Artificial Sequence
  Description of Artificial Sequence:  Enzymatic Nucleic acid
caccccuacugaugaggccguuaggccgaaaugccacc

SEQ ID NO: 3927 - RNA, 38 nt, Artificial Sequence
  Description of Artificial Sequence:  Enzymatic Nucleic acid
ucaccccucugaugaggccguuaggccgaaaaugccac

SEQ ID NO: 3928 - RNA, 38 nt, Artificial Sequence
  Description of Artificial Sequence:  Enzymatic Nucleic acid
gucacccccugaugaggccguuaggccgaaaaaugcca

SEQ ID NO: 3929 - RNA, 38 nt, Artificial Sequence
  Description of Artificial Sequence:  Enzymatic Nucleic acid
gugugaagcugaugaggccguuaggccgaaagucaccc

SEQ ID NO: 3930 - RNA, 38 nt, Artificial Sequence
  Description of Artificial Sequence:  Enzymatic Nucleic acid
uaugugugcugaugaggccguuaggccgaaaggaguca

SEQ ID NO: 3931 - RNA, 38 nt, Artificial Sequence
  Description of Artificial Sequence:  Enzymatic Nucleic acid
guaugugucugaugaggccguuaggccgaaaaggaguc

SEQ ID NO: 3932 - RNA, 38 nt, Artificial Sequence
  Description of Artificial Sequence:  Enzymatic Nucleic acid
aggaggagcugaugaggccguuaggccgaaauguguga

SEQ ID NO: 3933 - RNA, 38 nt, Artificial Sequence
  Description of Artificial Sequence:  Enzymatic Nucleic acid
cagaggagcugaugaggccguuaggccgaaaguaugug

SEQ ID NO: 3934 - RNA, 38 nt, Artificial Sequence
  Description of Artificial Sequence:  Enzymatic Nucleic acid
auccagagcugaugaggccguuaggccgaaaggaguau

SEQ ID NO: 3935 - RNA, 38 nt, Artificial Sequence
  Description of Artificial Sequence:  Enzymatic Nucleic acid
uggauccacugaugaggccguuaggccgaaaggaggag

SEQ ID NO: 3936 - RNA, 38 nt, Artificial Sequence
  Description of Artificial Sequence:  Enzymatic Nucleic acid
uuccugugcugaugaggccguuaggccgaaauccagag

SEQ ID NO: 3937 - RNA, 38 nt, Artificial Sequence
  Description of Artificial Sequence:  Enzymatic Nucleic acid
uuucagaacugaugaggccguuaggccgaaauccaguu

SEQ ID NO: 3938 - RNA, 38 nt, Artificial Sequence
  Description of Artificial Sequence:  Enzymatic Nucleic acid
guuuucagcugaugaggccguuaggccgaaauauccag

SEQ ID NO: 3939 - RNA, 38 nt, Artificial Sequence
  Description of Artificial Sequence:  Enzymatic Nucleic acid
gguuuucacugaugaggccguuaggccgaaaauaucca

SEQ ID NO: 3940 - RNA, 38 nt, Artificial Sequence
  Description of Artificial Sequence:  Enzymatic Nucleic acid
auuuccuucugaugaggccguuaggccgaaacgguuuu

SEQ ID NO: 3941 - RNA, 38 nt, Artificial Sequence
  Description of Artificial Sequence:  Enzymatic Nucleic acid
aacccugucugaugaggccguuaggccgaaauuuccuu

SEQ ID NO: 3942 - RNA, 38 nt, Artificial Sequence
  Description of Artificial Sequence:  Enzymatic Nucleic acid
ucagcaaacugaugaggccguuaggccgaaacccugug

SEQ ID NO: 3943 - RNA, 38 nt, Artificial Sequence
  Description of Artificial Sequence:  Enzymatic Nucleic acid
aucagcaacugaugaggccguuaggccgaaaacccugu

SEQ ID NO: 3944 - RNA, 38 nt, Artificial Sequence
  Description of Artificial Sequence:  Enzymatic Nucleic acid
aaucagcacugaugaggccguuaggccgaaaaacccug

SEQ ID NO: 3945 - RNA, 38 nt, Artificial Sequence
  Description of Artificial Sequence:  Enzymatic Nucleic acid
gaaucagccugaugaggccguuaggccgaaaaaacccu

SEQ ID NO: 3946 - RNA, 38 nt, Artificial Sequence
  Description of Artificial Sequence:  Enzymatic Nucleic acid
caagccugcugaugaggccguuaggccgaaaucagcaa

SEQ ID NO: 3947 - RNA, 38 nt, Artificial Sequence
  Description of Artificial Sequence:  Enzymatic Nucleic acid
ccaagccucugaugaggccguuaggccgaaaaucagca

SEQ ID NO: 3948 - RNA, 38 nt, Artificial Sequence
  Description of Artificial Sequence:  Enzymatic Nucleic acid
uucaggcccugaugaggccguuaggccgaaagccugaa

SEQ ID NO: 3949 - RNA, 38 nt, Artificial Sequence
  Description of Artificial Sequence:  Enzymatic Nucleic acid
aaggcaugcugaugaggccguuaggccgaaagguccgu

SEQ ID NO: 3950 - RNA, 38 nt, Artificial Sequence
  Description of Artificial Sequence:  Enzymatic Nucleic acid
gguucucacugaugaggccguuaggccgaaaggcaugg

SEQ ID NO: 3951 - RNA, 38 nt, Artificial Sequence
  Description of Artificial Sequence:  Enzymatic Nucleic acid
agguucuccugaugaggccguuaggccgaaaaggcaug

SEQ ID NO: 3952 - RNA, 38 nt, Artificial Sequence
  Description of Artificial Sequence:  Enzymatic Nucleic acid
augauuuccugaugaggccguuaggccgaaagguucuc

SEQ ID NO: 3953 - RNA, 38 nt, Artificial Sequence
  Description of Artificial Sequence:  Enzymatic Nucleic acid
ccgcguaucugaugaggccguuaggccgaaauuucuag

SEQ ID NO: 3954 - RNA, 38 nt, Artificial Sequence
  Description of Artificial Sequence:  Enzymatic Nucleic acid
cugccgcgcugaugaggccguuaggccgaaaugauuuc

SEQ ID NO: 3955 - RNA, 38 nt, Artificial Sequence
  Description of Artificial Sequence:  Enzymatic Nucleic acid
agaaaacucugaugaggccguuaggccgaaaccauguu

SEQ ID NO: 3956 - RNA, 38 nt, Artificial Sequence
  Description of Artificial Sequence:  Enzymatic Nucleic acid
caagagaacugaugaggccguuaggccgaaacugacca

SEQ ID NO: 3957 - RNA, 38 nt, Artificial Sequence
  Description of Artificial Sequence:  Enzymatic Nucleic acid
gcaagagacugaugaggccguuaggccgaaaacugacc

SEQ ID NO: 3958 - RNA, 38 nt, Artificial Sequence
  Description of Artificial Sequence:  Enzymatic Nucleic acid
ugcaagagcugaugaggccguuaggccgaaaaacugac

SEQ ID NO: 3959 - RNA, 38 nt, Artificial Sequence
  Description of Artificial Sequence:  Enzymatic Nucleic acid
cugcaagacugaugaggccguuaggccgaaaaaacuga

SEQ ID NO: 3960 - RNA, 38 nt, Artificial Sequence
  Description of Artificial Sequence:  Enzymatic Nucleic acid
gacugcaacugaugaggccguuaggccgaaagaaaacu

SEQ ID NO: 3961 - RNA, 38 nt, Artificial Sequence
  Description of Artificial Sequence:  Enzymatic Nucleic acid
acgacugccugaugaggccguuaggccgaaagagaaaa

SEQ ID NO: 3962 - RNA, 38 nt, Artificial Sequence
  Description of Artificial Sequence:  Enzymatic Nucleic acid
aggcugaccugaugaggccguuaggccgaaacugcaag

SEQ ID NO: 3963 - RNA, 38 nt, Artificial Sequence
  Description of Artificial Sequence:  Enzymatic Nucleic acid
uucaggcucugaugaggccguuaggccgaaacgacugc

SEQ ID NO: 3964 - RNA, 38 nt, Artificial Sequence
  Description of Artificial Sequence:  Enzymatic Nucleic acid
aaggaugucugaugaggccguuaggccgaaauguucag

SEQ ID NO: 3965 - RNA, 38 nt, Artificial Sequence
  Description of Artificial Sequence:  Enzymatic Nucleic acid
aucccaagcugaugaggccguuaggccgaaauguuaug

SEQ ID NO: 3966 - RNA, 38 nt, Artificial Sequence
  Description of Artificial Sequence:  Enzymatic Nucleic acid
guaauccccugaugaggccguuaggccgaaaggauguu

SEQ ID NO: 3967 - RNA, 38 nt, Artificial Sequence
  Description of Artificial Sequence:  Enzymatic Nucleic acid
gggagcgucugaugaggccguuaggccgaaaucccaag

SEQ ID NO: 3968 - RNA, 38 nt, Artificial Sequence
  Description of Artificial Sequence:  Enzymatic Nucleic acid
agggagcgcugaugaggccguuaggccgaaaaucccaa

SEQ ID NO: 3969 - RNA, 38 nt, Artificial Sequence
  Description of Artificial Sequence:  Enzymatic Nucleic acid
ccuugaggcugaugaggccguuaggccgaaagcguaau

SEQ ID NO: 3970 - RNA, 38 nt, Artificial Sequence
  Description of Artificial Sequence:  Enzymatic Nucleic acid
aucuccuucugaugaggccguuaggccgaaagggagcg

SEQ ID NO: 3971 - RNA, 38 nt, Artificial Sequence
  Description of Artificial Sequence:  Enzymatic Nucleic acid
ccaucacucugaugaggccguuaggccgaaaucuccuu

SEQ ID NO: 3972 - RNA, 38 nt, Artificial Sequence
  Description of Artificial Sequence:  Enzymatic Nucleic acid
ccugaaaucugaugaggccguuaggccgaaaucacauc

SEQ ID NO: 3973 - RNA, 38 nt, Artificial Sequence
  Description of Artificial Sequence:  Enzymatic Nucleic acid
uuuccugacugaugaggccguuaggccgaaauuaucac

SEQ ID NO: 3974 - RNA, 38 nt, Artificial Sequence
  Description of Artificial Sequence:  Enzymatic Nucleic acid
guuuccugcugaugaggccguuaggccgaaaauuauca

SEQ ID NO: 3975 - RNA, 38 nt, Artificial Sequence
  Description of Artificial Sequence:  Enzymatic Nucleic acid
uguuuccucugaugaggccguuaggccgaaaaauuauc

SEQ ID NO: 3976 - RNA, 38 nt, Artificial Sequence
  Description of Artificial Sequence:  Enzymatic Nucleic acid
auagcacacugaugaggccguuaggccgaaauuuuugu

SEQ ID NO: 3977 - RNA, 38 nt, Artificial Sequence
  Description of Artificial Sequence:  Enzymatic Nucleic acid
cauagcaccugaugaggccguuaggccgaaaauuuuug

SEQ ID NO: 3978 - RNA, 38 nt, Artificial Sequence
  Description of Artificial Sequence:  Enzymatic Nucleic acid
uauuugcacugaugaggccguuaggccgaaagcacaaa

SEQ ID NO: 3979 - RNA, 38 nt, Artificial Sequence
  Description of Artificial Sequence:  Enzymatic Nucleic acid
guuuauugcugaugaggccguuaggccgaaauuugcau

SEQ ID NO: 3980 - RNA, 38 nt, Artificial Sequence
  Description of Artificial Sequence:  Enzymatic Nucleic acid
uuccaguucugaugaggccguuaggccgaaauuguauu

SEQ ID NO: 3981 - RNA, 38 nt, Artificial Sequence
  Description of Artificial Sequence:  Enzymatic Nucleic acid
aggucccacugaugaggccguuaggccgaaacaguuuu

SEQ ID NO: 3982 - RNA, 38 nt, Artificial Sequence
  Description of Artificial Sequence:  Enzymatic Nucleic acid
gagguccccugaugaggccguuaggccgaaaacaguuu

SEQ ID NO: 3983 - RNA, 38 nt, Artificial Sequence
  Description of Artificial Sequence:  Enzymatic Nucleic acid
ucugaccgcugaugaggccguuaggccgaaagguccca

SEQ ID NO: 3984 - RNA, 38 nt, Artificial Sequence
  Description of Artificial Sequence:  Enzymatic Nucleic acid
gguuuucucugaugaggccguuaggccgaaaccggagg

SEQ ID NO: 3985 - RNA, 38 nt, Artificial Sequence
  Description of Artificial Sequence:  Enzymatic Nucleic acid
uugcuuaucugaugaggccguuaggccgaaauuuuggu

SEQ ID NO: 3986 - RNA, 38 nt, Artificial Sequence
  Description of Artificial Sequence:  Enzymatic Nucleic acid
guugcuuacugaugaggccguuaggccgaaaauuuugg

SEQ ID NO: 3987 - RNA, 38 nt, Artificial Sequence
  Description of Artificial Sequence:  Enzymatic Nucleic acid
cuguugcucugaugaggccguuaggccgaaauaauuuu

SEQ ID NO: 3988 - RNA, 38 nt, Artificial Sequence
  Description of Artificial Sequence:  Enzymatic Nucleic acid
gcauggcacugaugaggccguuaggccgaaaccuggcc

SEQ ID NO: 3989 - RNA, 38 nt, Artificial Sequence
  Description of Artificial Sequence:  Enzymatic Nucleic acid
gggagcaccugaugaggccguuaggccgaaaggcaugg

SEQ ID NO: 3990 - RNA, 38 nt, Artificial Sequence
  Description of Artificial Sequence:  Enzymatic Nucleic acid
ccucggggcugaugaggccguuaggccgaaagcacaag

SEQ ID NO: 3991 - RNA, 38 nt, Artificial Sequence
  Description of Artificial Sequence:  Enzymatic Nucleic acid
cggcaagacugaugaggccguuaggccgaaacgcaguc

SEQ ID NO: 3992 - RNA, 38 nt, Artificial Sequence
  Description of Artificial Sequence:  Enzymatic Nucleic acid
uccggcaacugaugaggccguuaggccgaaagacgcag

SEQ ID NO: 3993 - RNA, 38 nt, Artificial Sequence
  Description of Artificial Sequence:  Enzymatic Nucleic acid
auuccggccugaugaggccguuaggccgaaagagacgc

SEQ ID NO: 3994 - RNA, 38 nt, Artificial Sequence
  Description of Artificial Sequence:  Enzymatic Nucleic acid
ccucggcucugaugaggccguuaggccgaaacauuccg

SEQ ID NO: 3995 - RNA, 38 nt, Artificial Sequence
  Description of Artificial Sequence:  Enzymatic Nucleic acid
cccuccagcugaugaggccguuaggccgaaagcuugca

SEQ ID NO: 3996 - RNA, 38 nt, Artificial Sequence
  Description of Artificial Sequence:  Enzymatic Nucleic acid
acccuccacugaugaggccguuaggccgaaaagcuugc

SEQ ID NO: 3997 - RNA, 38 nt, Artificial Sequence
  Description of Artificial Sequence:  Enzymatic Nucleic acid
ucuccacacugaugaggccguuaggccgaaacucccuu

SEQ ID NO: 3998 - RNA, 38 nt, Artificial Sequence
  Description of Artificial Sequence:  Enzymatic Nucleic acid
uucuccaccugaugaggccguuaggccgaaaacucccu

SEQ ID NO: 3999 - RNA, 38 nt, Artificial Sequence
  Description of Artificial Sequence:  Enzymatic Nucleic acid
ugcacucacugaugaggccguuaggccgaaaguucucc

SEQ ID NO: 4000 - RNA, 38 nt, Artificial Sequence
  Description of Artificial Sequence:  Enzymatic Nucleic acid
uggcacugcugaugaggccguuaggccgaaaugcacuc

SEQ ID NO: 4001 - RNA, 38 nt, Artificial Sequence
  Description of Artificial Sequence:  Enzymatic Nucleic acid
cauggccucugaugaggccguuaggccgaaaggcaggc

SEQ ID NO: 4002 - RNA, 38 nt, Artificial Sequence
  Description of Artificial Sequence:  Enzymatic Nucleic acid
gugcaggucugaugaggccguuaggccgaaauguucau

SEQ ID NO: 4003 - RNA, 38 nt, Artificial Sequence
  Description of Artificial Sequence:  Enzymatic Nucleic acid
acacuggacugaugaggccguuaggccgaaacaguugu

SEQ ID NO: 4004 - RNA, 38 nt, Artificial Sequence
  Description of Artificial Sequence:  Enzymatic Nucleic acid
gcacacugcugaugaggccguuaggccgaaauacaguu

SEQ ID NO: 4005 - RNA, 38 nt, Artificial Sequence
  Description of Artificial Sequence:  Enzymatic Nucleic acid
cgucaaugcugaugaggccguuaggccgaaagugggca

SEQ ID NO: 4006 - RNA, 38 nt, Artificial Sequence
  Description of Artificial Sequence:  Enzymatic Nucleic acid
gggccguccugaugaggccguuaggccgaaauguagug

SEQ ID NO: 4007 - RNA, 38 nt, Artificial Sequence
  Description of Artificial Sequence:  Enzymatic Nucleic acid
caggucuucugaugaggccguuaggccgaaacgcagug

SEQ ID NO: 4008 - RNA, 38 nt, Artificial Sequence
  Description of Artificial Sequence:  Enzymatic Nucleic acid
ucucccaucugaugaggccguuaggccgaaacuccugc

SEQ ID NO: 4009 - RNA, 38 nt, Artificial Sequence
  Description of Artificial Sequence:  Enzymatic Nucleic acid
uacuuccacugaugaggccguuaggccgaaaccagggu

SEQ ID NO: 4010 - RNA, 38 nt, Artificial Sequence
  Description of Artificial Sequence:  Enzymatic Nucleic acid
cgucugcgcugaugaggccguuaggccgaaacuuccag

SEQ ID NO: 4011 - RNA, 38 nt, Artificial Sequence
  Description of Artificial Sequence:  Enzymatic Nucleic acid
gcaguuugcugaugaggccguuaggccgaaauggcaca

SEQ ID NO: 4012 - RNA, 38 nt, Artificial Sequence
  Description of Artificial Sequence:  Enzymatic Nucleic acid
ugcauccgcugaugaggccguuaggccgaaaggugcag

SEQ ID NO: 4013 - RNA, 38 nt, Artificial Sequence
  Description of Artificial Sequence:  Enzymatic Nucleic acid
gccuucaacugaugaggccguuaggccgaaaccuggcc

SEQ ID NO: 4014 - RNA, 38 nt, Artificial Sequence
  Description of Artificial Sequence:  Enzymatic Nucleic acid
cagccuuccugaugaggccguuaggccgaaagaccugg

SEQ ID NO: 4015 - RNA, 38 nt, Artificial Sequence
  Description of Artificial Sequence:  Enzymatic Nucleic acid
auucguugcugaugaggccguuaggccgaaacagccuu

SEQ ID NO: 4016 - RNA, 38 nt, Artificial Sequence
  Description of Artificial Sequence:  Enzymatic Nucleic acid
cgggaucucugaugaggccguuaggccgaaaggcccau

SEQ ID NO: 4017 - RNA, 38 nt, Artificial Sequence
  Description of Artificial Sequence:  Enzymatic Nucleic acid
auggacggcugaugaggccguuaggccgaaaucuuagg

SEQ ID NO: 4018 - RNA, 38 nt, Artificial Sequence
  Description of Artificial Sequence:  Enzymatic Nucleic acid
uggcgaugcugaugaggccguuaggccgaaacgggauc

SEQ ID NO: 4019 - RNA, 38 nt, Artificial Sequence
  Description of Artificial Sequence:  Enzymatic Nucleic acid
ccaguggccugaugaggccguuaggccgaaauggacgg

SEQ ID NO: 4020 - RNA, 38 nt, Artificial Sequence
  Description of Artificial Sequence:  Enzymatic Nucleic acid
agcaagagcugaugaggccguuaggccgaaagggcccc

SEQ ID NO: 4021 - RNA, 38 nt, Artificial Sequence
  Description of Artificial Sequence:  Enzymatic Nucleic acid
agcagcaacugaugaggccguuaggccgaaaggagggc

SEQ ID NO: 4022 - RNA, 38 nt, Artificial Sequence
  Description of Artificial Sequence:  Enzymatic Nucleic acid
ccagcagccugaugaggccguuaggccgaaagaggagg

SEQ ID NO: 4023 - RNA, 38 nt, Artificial Sequence
  Description of Artificial Sequence:  Enzymatic Nucleic acid
aagaggcccugaugaggccguuaggccgaaauccccag

SEQ ID NO: 4024 - RNA, 38 nt, Artificial Sequence
  Description of Artificial Sequence:  Enzymatic Nucleic acid
cgcaugaacugaugaggccguuaggccgaaaggccgau

SEQ ID NO: 4025 - RNA, 38 nt, Artificial Sequence
  Description of Artificial Sequence:  Enzymatic Nucleic acid
uucgcaugcugaugaggccguuaggccgaaagaggccg

SEQ ID NO: 4026 - RNA, 38 nt, Artificial Sequence
  Description of Artificial Sequence:  Enzymatic Nucleic acid
cuucgcaucugaugaggccguuaggccgaaaagaggcc

SEQ ID NO: 4027 - RNA, 38 nt, Artificial Sequence
  Description of Artificial Sequence:  Enzymatic Nucleic acid
uuccgaaccugaugaggccguuaggccgaaauguggcg

SEQ ID NO: 4028 - RNA, 38 nt, Artificial Sequence
  Description of Artificial Sequence:  Enzymatic Nucleic acid
cgcuuccgcugaugaggccguuaggccgaaacgaugug

SEQ ID NO: 4029 - RNA, 38 nt, Artificial Sequence
  Description of Artificial Sequence:  Enzymatic Nucleic acid
gcgcuucccugaugaggccguuaggccgaaaacgaugu

SEQ ID NO: 4030 - RNA, 38 nt, Artificial Sequence
  Description of Artificial Sequence:  Enzymatic Nucleic acid
ggcuccaccugaugaggccguuaggccgaaagcucccu

SEQ ID NO: 4031 - RNA, 38 nt, Artificial Sequence
  Description of Artificial Sequence:  Enzymatic Nucleic acid
ggguguaacugaugaggccguuaggccgaaaggcucca

SEQ ID NO: 4032 - RNA, 38 nt, Artificial Sequence
  Description of Artificial Sequence:  Enzymatic Nucleic acid
cugggugucugaugaggccguuaggccgaaagaggcuc

SEQ ID NO: 4033 - RNA, 38 nt, Artificial Sequence
  Description of Artificial Sequence:  Enzymatic Nucleic acid
acugggugcugaugaggccguuaggccgaaaagaggcu

SEQ ID NO: 4034 - RNA, 38 nt, Artificial Sequence
  Description of Artificial Sequence:  Enzymatic Nucleic acid
uugguuggcugaugaggccguuaggccgaaagcuucuc

SEQ ID NO: 4035 - RNA, 38 nt, Artificial Sequence
  Description of Artificial Sequence:  Enzymatic Nucleic acid
ccucaagacugaugaggccguuaggccgaaagcuuggu

SEQ ID NO: 4036 - RNA, 38 nt, Artificial Sequence
  Description of Artificial Sequence:  Enzymatic Nucleic acid
auccucaacugaugaggccguuaggccgaaagagcuug

SEQ ID NO: 4037 - RNA, 38 nt, Artificial Sequence
  Description of Artificial Sequence:  Enzymatic Nucleic acid
agauccuccugaugaggccguuaggccgaaagagagcu

SEQ ID NO: 4038 - RNA, 38 nt, Artificial Sequence
  Description of Artificial Sequence:  Enzymatic Nucleic acid
uccuucaacugaugaggccguuaggccgaaauccucaa

SEQ ID NO: 4039 - RNA, 38 nt, Artificial Sequence
  Description of Artificial Sequence:  Enzymatic Nucleic acid
uuuccuuccugaugaggccguuaggccgaaagauccuc

SEQ ID NO: 4040 - RNA, 38 nt, Artificial Sequence
  Description of Artificial Sequence:  Enzymatic Nucleic acid
ucuuuuugcugaugaggccguuaggccgaaauucaguu

SEQ ID NO: 4041 - RNA, 38 nt, Artificial Sequence
  Description of Artificial Sequence:  Enzymatic Nucleic acid
aucuuuuucugaugaggccguuaggccgaaaauucagu

SEQ ID NO: 4042 - RNA, 38 nt, Artificial Sequence
  Description of Artificial Sequence:  Enzymatic Nucleic acid
agcacuuucugaugaggccguuaggccgaaaucuuuuu

SEQ ID NO: 4043 - RNA, 38 nt, Artificial Sequence
  Description of Artificial Sequence:  Enzymatic Nucleic acid
acgcaccgcugaugaggccguuaggccgaaagcccagc

SEQ ID NO: 4044 - RNA, 38 nt, Artificial Sequence
  Description of Artificial Sequence:  Enzymatic Nucleic acid
ccgugccgcugaugaggccguuaggccgaaacgcaccg

SEQ ID NO: 4045 - RNA, 38 nt, Artificial Sequence
  Description of Artificial Sequence:  Enzymatic Nucleic acid
accgugcccugaugaggccguuaggccgaaaacgcacc

SEQ ID NO: 4046 - RNA, 38 nt, Artificial Sequence
  Description of Artificial Sequence:  Enzymatic Nucleic acid
gucccuuacugaugaggccguuaggccgaaacaccgug

SEQ ID NO: 4047 - RNA, 38 nt, Artificial Sequence
  Description of Artificial Sequence:  Enzymatic Nucleic acid
gagucccucugaugaggccguuaggccgaaauacaccg

SEQ ID NO: 4048 - RNA, 38 nt, Artificial Sequence
  Description of Artificial Sequence:  Enzymatic Nucleic acid
gggauccacugaugaggccguuaggccgaaagucccuu

SEQ ID NO: 4049 - RNA, 38 nt, Artificial Sequence
  Description of Artificial Sequence:  Enzymatic Nucleic acid
ccuucuggcugaugaggccguuaggccgaaauccagag

SEQ ID NO: 4050 - RNA, 38 nt, Artificial Sequence
  Description of Artificial Sequence:  Enzymatic Nucleic acid
ggaauuuucugaugaggccguuaggccgaaacuuucuc

SEQ ID NO: 4051 - RNA, 38 nt, Artificial Sequence
  Description of Artificial Sequence:  Enzymatic Nucleic acid
gggaauuucugaugaggccguuaggccgaaaacuuucu

SEQ ID NO: 4052 - RNA, 38 nt, Artificial Sequence
  Description of Artificial Sequence:  Enzymatic Nucleic acid
gcgacgggcugaugaggccguuaggccgaaauuuuaac

SEQ ID NO: 4053 - RNA, 38 nt, Artificial Sequence
  Description of Artificial Sequence:  Enzymatic Nucleic acid
agcgacggcugaugaggccguuaggccgaaaauuuuaa

SEQ ID NO: 4054 - RNA, 38 nt, Artificial Sequence
  Description of Artificial Sequence:  Enzymatic Nucleic acid
uugauagccugaugaggccguuaggccgaaacgggaau

SEQ ID NO: 4055 - RNA, 38 nt, Artificial Sequence
  Description of Artificial Sequence:  Enzymatic Nucleic acid
uuccuugacugaugaggccguuaggccgaaagcgacgg

SEQ ID NO: 4056 - RNA, 38 nt, Artificial Sequence
  Description of Artificial Sequence:  Enzymatic Nucleic acid
aauuccuucugaugaggccguuaggccgaaauagcgac

SEQ ID NO: 4057 - RNA, 38 nt, Artificial Sequence
  Description of Artificial Sequence:  Enzymatic Nucleic acid
cuucucuucugaugaggccguuaggccgaaauuccuug

SEQ ID NO: 4058 - RNA, 38 nt, Artificial Sequence
  Description of Artificial Sequence:  Enzymatic Nucleic acid
gcuucucucugaugaggccguuaggccgaaaauuccuu

SEQ ID NO: 4059 - RNA, 38 nt, Artificial Sequence
  Description of Artificial Sequence:  Enzymatic Nucleic acid
cuuucggacugaugaggccguuaggccgaaauguugcu

SEQ ID NO: 4060 - RNA, 38 nt, Artificial Sequence
  Description of Artificial Sequence:  Enzymatic Nucleic acid
ggcuuucgcugaugaggccguuaggccgaaagauguug

SEQ ID NO: 4061 - RNA, 38 nt, Artificial Sequence
  Description of Artificial Sequence:  Enzymatic Nucleic acid
ucaucgagcugaugaggccguuaggccgaaauuuccuu

SEQ ID NO: 4062 - RNA, 38 nt, Artificial Sequence
  Description of Artificial Sequence:  Enzymatic Nucleic acid
gcuucauccugaugaggccguuaggccgaaaggauuuc

SEQ ID NO: 4063 - RNA, 38 nt, Artificial Sequence
  Description of Artificial Sequence:  Enzymatic Nucleic acid
ccaucacgcugaugaggccguuaggccgaaaggcuuca

SEQ ID NO: 4064 - RNA, 38 nt, Artificial Sequence
  Description of Artificial Sequence:  Enzymatic Nucleic acid
gugaggcacugaugaggccguuaggccgaaaugcccag

SEQ ID NO: 4065 - RNA, 38 nt, Artificial Sequence
  Description of Artificial Sequence:  Enzymatic Nucleic acid
guggaggucugaugaggccguuaggccgaaaggcagau

SEQ ID NO: 4066 - RNA, 38 nt, Artificial Sequence
  Description of Artificial Sequence:  Enzymatic Nucleic acid
gcacggugcugaugaggccguuaggccgaaaggugagg

SEQ ID NO: 4067 - RNA, 38 nt, Artificial Sequence
  Description of Artificial Sequence:  Enzymatic Nucleic acid
ugcgugaucugaugaggccguuaggccgaaaguugcac

SEQ ID NO: 4068 - RNA, 38 nt, Artificial Sequence
  Description of Artificial Sequence:  Enzymatic Nucleic acid
agcugcgucugaugaggccguuaggccgaaaugaguug

SEQ ID NO: 4069 - RNA, 38 nt, Artificial Sequence
  Description of Artificial Sequence:  Enzymatic Nucleic acid
aagggcaucugaugaggccguuaggccgaaagcugcgu

SEQ ID NO: 4070 - RNA, 38 nt, Artificial Sequence
  Description of Artificial Sequence:  Enzymatic Nucleic acid
ggcagccgcugaugaggccguuaggccgaaagggcaug

SEQ ID NO: 4071 - RNA, 38 nt, Artificial Sequence
  Description of Artificial Sequence:  Enzymatic Nucleic acid
aggcagcccugaugaggccguuaggccgaaaagggcau

SEQ ID NO: 4072 - RNA, 38 nt, Artificial Sequence
  Description of Artificial Sequence:  Enzymatic Nucleic acid
uaguccagcugaugaggccguuaggccgaaaggcagcc

SEQ ID NO: 4073 - RNA, 38 nt, Artificial Sequence
  Description of Artificial Sequence:  Enzymatic Nucleic acid
cccggacacugaugaggccguuaggccgaaaguccagg

SEQ ID NO: 4074 - RNA, 38 nt, Artificial Sequence
  Description of Artificial Sequence:  Enzymatic Nucleic acid
uguucccgcugaugaggccguuaggccgaaacauaguc

SEQ ID NO: 4075 - RNA, 38 nt, Artificial Sequence
  Description of Artificial Sequence:  Enzymatic Nucleic acid
ggagccaacugaugaggccguuaggccgaaauugucuu

SEQ ID NO: 4076 - RNA, 38 nt, Artificial Sequence
  Description of Artificial Sequence:  Enzymatic Nucleic acid
ugggagcccugaugaggccguuaggccgaaauauuguc

SEQ ID NO: 4077 - RNA, 38 nt, Artificial Sequence
  Description of Artificial Sequence:  Enzymatic Nucleic acid
gguacuggcugaugaggccguuaggccgaaagccaaua

SEQ ID NO: 4078 - RNA, 38 nt, Artificial Sequence
  Description of Artificial Sequence:  Enzymatic Nucleic acid
ugagcaggcugaugaggccguuaggccgaaacugggag

SEQ ID NO: 4079 - RNA, 38 nt, Artificial Sequence
  Description of Artificial Sequence:  Enzymatic Nucleic acid
caccaguucugaugaggccguuaggccgaaagcaggua

SEQ ID NO: 4080 - RNA, 38 nt, Artificial Sequence
  Description of Artificial Sequence:  Enzymatic Nucleic acid
cccuuugccugaugaggccguuaggccgaaaucugcac

SEQ ID NO: 4081 - RNA, 38 nt, Artificial Sequence
  Description of Artificial Sequence:  Enzymatic Nucleic acid
ccuccaagcugaugaggccguuaggccgaaaguucaug

SEQ ID NO: 4082 - RNA, 38 nt, Artificial Sequence
  Description of Artificial Sequence:  Enzymatic Nucleic acid
gguccucccugaugaggccguuaggccgaaaguaguuc

SEQ ID NO: 4083 - RNA, 38 nt, Artificial Sequence
  Description of Artificial Sequence:  Enzymatic Nucleic acid
caccaagccugaugaggccguuaggccgaaacgguccu

SEQ ID NO: 4084 - RNA, 38 nt, Artificial Sequence
  Description of Artificial Sequence:  Enzymatic Nucleic acid
ggugcacccugaugaggccguuaggccgaaagcgacgg

SEQ ID NO: 4085 - RNA, 38 nt, Artificial Sequence
  Description of Artificial Sequence:  Enzymatic Nucleic acid
uucaccagcugaugaggccguuaggccgaaacguuccu

SEQ ID NO: 4086 - RNA, 38 nt, Artificial Sequence
  Description of Artificial Sequence:  Enzymatic Nucleic acid
gugaucuucugaugaggccguuaggccgaaacaugcug

SEQ ID NO: 4087 - RNA, 38 nt, Artificial Sequence
  Description of Artificial Sequence:  Enzymatic Nucleic acid
aaaucugucugaugaggccguuaggccgaaaucuugac

SEQ ID NO: 4088 - RNA, 38 nt, Artificial Sequence
  Description of Artificial Sequence:  Enzymatic Nucleic acid
cagcccaacugaugaggccguuaggccgaaaucuguga

SEQ ID NO: 4089 - RNA, 38 nt, Artificial Sequence
  Description of Artificial Sequence:  Enzymatic Nucleic acid
ccagcccacugaugaggccguuaggccgaaaaucugug

SEQ ID NO: 4090 - RNA, 38 nt, Artificial Sequence
  Description of Artificial Sequence:  Enzymatic Nucleic acid
gccagccccugaugaggccguuaggccgaaaaaucugu

SEQ ID NO: 4091 - RNA, 38 nt, Artificial Sequence
  Description of Artificial Sequence:  Enzymatic Nucleic acid
cugcauggcugaugaggccguuaggccgaaauucuuuc

SEQ ID NO: 4092 - RNA, 38 nt, Artificial Sequence
  Description of Artificial Sequence:  Enzymatic Nucleic acid
ccacuugacugaugaggccguuaggccgaaaggcacuu

SEQ ID NO: 4093 - RNA, 38 nt, Artificial Sequence
  Description of Artificial Sequence:  Enzymatic Nucleic acid
auccacuucugaugaggccguuaggccgaaauaggcac

SEQ ID NO: 4094 - RNA, 38 nt, Artificial Sequence
  Description of Artificial Sequence:  Enzymatic Nucleic acid
uugauucccugaugaggccguuaggccgaaaugccauc

SEQ ID NO: 4095 - RNA, 38 nt, Artificial Sequence
  Description of Artificial Sequence:  Enzymatic Nucleic acid
guaaaauucugaugaggccguuaggccgaaauuccaau

SEQ ID NO: 4096 - RNA, 38 nt, Artificial Sequence
  Description of Artificial Sequence:  Enzymatic Nucleic acid
cuguguaacugaugaggccguuaggccgaaauugauuc

SEQ ID NO: 4097 - RNA, 38 nt, Artificial Sequence
  Description of Artificial Sequence:  Enzymatic Nucleic acid
ucuguguacugaugaggccguuaggccgaaaauugauu

SEQ ID NO: 4098 - RNA, 38 nt, Artificial Sequence
  Description of Artificial Sequence:  Enzymatic Nucleic acid
uucugugucugaugaggccguuaggccgaaaaauugau

SEQ ID NO: 4099 - RNA, 38 nt, Artificial Sequence
  Description of Artificial Sequence:  Enzymatic Nucleic acid
auucugugcugaugaggccguuaggccgaaaaaauuga

SEQ ID NO: 4100 - RNA, 38 nt, Artificial Sequence
  Description of Artificial Sequence:  Enzymatic Nucleic acid
uggguauacugaugaggccguuaggccgaaauucugug

SEQ ID NO: 4101 - RNA, 38 nt, Artificial Sequence
  Description of Artificial Sequence:  Enzymatic Nucleic acid
gguggguacugaugaggccguuaggccgaaagauucug

SEQ ID NO: 4102 - RNA, 38 nt, Artificial Sequence
  Description of Artificial Sequence:  Enzymatic Nucleic acid
cuggugggcugaugaggccguuaggccgaaauagauuc

SEQ ID NO: 4103 - RNA, 38 nt, Artificial Sequence
  Description of Artificial Sequence:  Enzymatic Nucleic acid
uagcuccacugaugaggccguuaggccgaaacaucacu

SEQ ID NO: 4104 - RNA, 38 nt, Artificial Sequence
  Description of Artificial Sequence:  Enzymatic Nucleic acid
ucaccccgcugaugaggccguuaggccgaaagcuccag

SEQ ID NO: 4105 - RNA, 38 nt, Artificial Sequence
  Description of Artificial Sequence:  Enzymatic Nucleic acid
aacucccacugaugaggccguuaggccgaaacggucac

SEQ ID NO: 4106 - RNA, 38 nt, Artificial Sequence
  Description of Artificial Sequence:  Enzymatic Nucleic acid
caacuccccugaugaggccguuaggccgaaaacgguca

SEQ ID NO: 4107 - RNA, 38 nt, Artificial Sequence
  Description of Artificial Sequence:  Enzymatic Nucleic acid
aggucauccugaugaggccguuaggccgaaacucccaa

SEQ ID NO: 4108 - RNA, 38 nt, Artificial Sequence
  Description of Artificial Sequence:  Enzymatic Nucleic acid
uggauccacugaugaggccguuaggccgaaaggucauc

SEQ ID NO: 4109 - RNA, 38 nt, Artificial Sequence
  Description of Artificial Sequence:  Enzymatic Nucleic acid
uuggaucccugaugaggccguuaggccgaaaaggucau

SEQ ID NO: 4110 - RNA, 38 nt, Artificial Sequence
  Description of Artificial Sequence:  Enzymatic Nucleic acid
auggcuugcugaugaggccguuaggccgaaauccaaag

SEQ ID NO: 4111 - RNA, 38 nt, Artificial Sequence
  Description of Artificial Sequence:  Enzymatic Nucleic acid
uuccgucacugaugaggccguuaggccgaaauggcuug

SEQ ID NO: 4112 - RNA, 38 nt, Artificial Sequence
  Description of Artificial Sequence:  Enzymatic Nucleic acid
cuggcaggcugaugaggccguuaggccgaaauuccguc

SEQ ID NO: 4113 - RNA, 38 nt, Artificial Sequence
  Description of Artificial Sequence:  Enzymatic Nucleic acid
auggaggacugaugaggccguuaggccgaaaucucgcu

SEQ ID NO: 4114 - RNA, 38 nt, Artificial Sequence
  Description of Artificial Sequence:  Enzymatic Nucleic acid
ggauggagcugaugaggccguuaggccgaaagaucucg

SEQ ID NO: 4115 - RNA, 38 nt, Artificial Sequence
  Description of Artificial Sequence:  Enzymatic Nucleic acid
ccaggaugcugaugaggccguuaggccgaaaggagauc

SEQ ID NO: 4116 - RNA, 38 nt, Artificial Sequence
  Description of Artificial Sequence:  Enzymatic Nucleic acid
uucuccagcugaugaggccguuaggccgaaauggagga

SEQ ID NO: 4117 - RNA, 38 nt, Artificial Sequence
  Description of Artificial Sequence:  Enzymatic Nucleic acid
ggcugaggcugaugaggccguuaggccgaaaggcguuc

SEQ ID NO: 4118 - RNA, 38 nt, Artificial Sequence
  Description of Artificial Sequence:  Enzymatic Nucleic acid
ggguggcucugaugaggccguuaggccgaaagggaggc

SEQ ID NO: 4119 - RNA, 38 nt, Artificial Sequence
  Description of Artificial Sequence:  Enzymatic Nucleic acid
augguacacugaugaggccguuaggccgaaaugggugg

SEQ ID NO: 4120 - RNA, 38 nt, Artificial Sequence
  Description of Artificial Sequence:  Enzymatic Nucleic acid
aucgauggcugaugaggccguuaggccgaaacauaugg

SEQ ID NO: 4121 - RNA, 38 nt, Artificial Sequence
  Description of Artificial Sequence:  Enzymatic Nucleic acid
uagacauccugaugaggccguuaggccgaaaugguaca

SEQ ID NO: 4122 - RNA, 38 nt, Artificial Sequence
  Description of Artificial Sequence:  Enzymatic Nucleic acid
aucauguacugaugaggccguuaggccgaaacaucgau

SEQ ID NO: 4123 - RNA, 38 nt, Artificial Sequence
  Description of Artificial Sequence:  Enzymatic Nucleic acid
ugaucaugcugaugaggccguuaggccgaaagacaucg

SEQ ID NO: 4124 - RNA, 38 nt, Artificial Sequence
  Description of Artificial Sequence:  Enzymatic Nucleic acid
uugaccaucugaugaggccguuaggccgaaaucaugua

SEQ ID NO: 4125 - RNA, 38 nt, Artificial Sequence
  Description of Artificial Sequence:  Enzymatic Nucleic acid
cagcacuucugaugaggccguuaggccgaaaccaugau

SEQ ID NO: 4126 - RNA, 38 nt, Artificial Sequence
  Description of Artificial Sequence:  Enzymatic Nucleic acid
ucugcguccugaugaggccguuaggccgaaaucaucca

SEQ ID NO: 4127 - RNA, 38 nt, Artificial Sequence
  Description of Artificial Sequence:  Enzymatic Nucleic acid
ugggcgaccugaugaggccguuaggccgaaaucugcgu

SEQ ID NO: 4128 - RNA, 38 nt, Artificial Sequence
  Description of Artificial Sequence:  Enzymatic Nucleic acid
cuuugggccugaugaggccguuaggccgaaacuaucug

SEQ ID NO: 4129 - RNA, 38 nt, Artificial Sequence
  Description of Artificial Sequence:  Enzymatic Nucleic acid
acucacggcugaugaggccguuaggccgaaacuuuggg

SEQ ID NO: 4130 - RNA, 38 nt, Artificial Sequence
  Description of Artificial Sequence:  Enzymatic Nucleic acid
aacucacgcugaugaggccguuaggccgaaaacuuugg

SEQ ID NO: 4131 - RNA, 38 nt, Artificial Sequence
  Description of Artificial Sequence:  Enzymatic Nucleic acid
cgaugauccugaugaggccguuaggccgaaacucacgg

SEQ ID NO: 4132 - RNA, 38 nt, Artificial Sequence
  Description of Artificial Sequence:  Enzymatic Nucleic acid
aauucgaucugaugaggccguuaggccgaaaucaacuc

SEQ ID NO: 4133 - RNA, 38 nt, Artificial Sequence
  Description of Artificial Sequence:  Enzymatic Nucleic acid
gagaauuccugaugaggccguuaggccgaaaugaucaa

SEQ ID NO: 4134 - RNA, 38 nt, Artificial Sequence
  Description of Artificial Sequence:  Enzymatic Nucleic acid
uuuuggagcugaugaggccguuaggccgaaauucgaug

SEQ ID NO: 4135 - RNA, 38 nt, Artificial Sequence
  Description of Artificial Sequence:  Enzymatic Nucleic acid
auuuuggacugaugaggccguuaggccgaaaauucgau

SEQ ID NO: 4136 - RNA, 38 nt, Artificial Sequence
  Description of Artificial Sequence:  Enzymatic Nucleic acid
ccauuuugcugaugaggccguuaggccgaaagaauucg

SEQ ID NO: 4137 - RNA, 38 nt, Artificial Sequence
  Description of Artificial Sequence:  Enzymatic Nucleic acid
ugacaaggcugaugaggccguuaggccgaaagcgcugg

SEQ ID NO: 4138 - RNA, 38 nt, Artificial Sequence
  Description of Artificial Sequence:  Enzymatic Nucleic acid
ugaaugaccugaugaggccguuaggccgaaagguagcg

SEQ ID NO: 4139 - RNA, 38 nt, Artificial Sequence
  Description of Artificial Sequence:  Enzymatic Nucleic acid
cccugaaucugaugaggccguuaggccgaaacaaggua

SEQ ID NO: 4140 - RNA, 38 nt, Artificial Sequence
  Description of Artificial Sequence:  Enzymatic Nucleic acid
ucccccugcugaugaggccguuaggccgaaaugacaag

SEQ ID NO: 4141 - RNA, 38 nt, Artificial Sequence
  Description of Artificial Sequence:  Enzymatic Nucleic acid
aucccccucugaugaggccguuaggccgaaaaugacaa

SEQ ID NO: 4142 - RNA, 38 nt, Artificial Sequence
  Description of Artificial Sequence:  Enzymatic Nucleic acid
acuuggcacugaugaggccguuaggccgaaaugcauuc

SEQ ID NO: 4143 - RNA, 38 nt, Artificial Sequence
  Description of Artificial Sequence:  Enzymatic Nucleic acid
gacuuggccugaugaggccguuaggccgaaaaugcauu

SEQ ID NO: 4144 - RNA, 38 nt, Artificial Sequence
  Description of Artificial Sequence:  Enzymatic Nucleic acid
gucuguagcugaugaggccguuaggccgaaacuuggca

SEQ ID NO: 4145 - RNA, 38 nt, Artificial Sequence
  Description of Artificial Sequence:  Enzymatic Nucleic acid
ggagucugcugaugaggccguuaggccgaaaggacuug

SEQ ID NO: 4146 - RNA, 38 nt, Artificial Sequence
  Description of Artificial Sequence:  Enzymatic Nucleic acid
agaaguugcugaugaggccguuaggccgaaagucugua

SEQ ID NO: 4147 - RNA, 38 nt, Artificial Sequence
  Description of Artificial Sequence:  Enzymatic Nucleic acid
cacgguagcugaugaggccguuaggccgaaaguuggag

SEQ ID NO: 4148 - RNA, 38 nt, Artificial Sequence
  Description of Artificial Sequence:  Enzymatic Nucleic acid
gcacgguacugaugaggccguuaggccgaaaaguugga

SEQ ID NO: 4149 - RNA, 38 nt, Artificial Sequence
  Description of Artificial Sequence:  Enzymatic Nucleic acid
gggcacggcugaugaggccguuaggccgaaagaaguug

SEQ ID NO: 4150 - RNA, 38 nt, Artificial Sequence
  Description of Artificial Sequence:  Enzymatic Nucleic acid
ggaugaggcugaugaggccguuaggccgaaacucgucg

SEQ ID NO: 4151 - RNA, 38 nt, Artificial Sequence
  Description of Artificial Sequence:  Enzymatic Nucleic acid
ugugggaucugaugaggccguuaggccgaaagguacuc

SEQ ID NO: 4152 - RNA, 38 nt, Artificial Sequence
  Description of Artificial Sequence:  Enzymatic Nucleic acid
ugcuguggcugaugaggccguuaggccgaaaugaggua

SEQ ID NO: 4153 - RNA, 38 nt, Artificial Sequence
  Description of Artificial Sequence:  Enzymatic Nucleic acid
ugcugaagcugaugaggccguuaggccgaaagcccugc

SEQ ID NO: 4154 - RNA, 38 nt, Artificial Sequence
  Description of Artificial Sequence:  Enzymatic Nucleic acid
cugcugaacugaugaggccguuaggccgaaaagcccug

SEQ ID NO: 4155 - RNA, 38 nt, Artificial Sequence
  Description of Artificial Sequence:  Enzymatic Nucleic acid
ggcugcugcugaugaggccguuaggccgaaagaagccc

SEQ ID NO: 4156 - RNA, 38 nt, Artificial Sequence
  Description of Artificial Sequence:  Enzymatic Nucleic acid
gggcugcucugaugaggccguuaggccgaaaagaagcc

SEQ ID NO: 4157 - RNA, 38 nt, Artificial Sequence
  Description of Artificial Sequence:  Enzymatic Nucleic acid
gugacgugcugaugaggccguuaggccgaaaggggcug

SEQ ID NO: 4158 - RNA, 38 nt, Artificial Sequence
  Description of Artificial Sequence:  Enzymatic Nucleic acid
gaguccgucugaugaggccguuaggccgaaacguggag

SEQ ID NO: 4159 - RNA, 38 nt, Artificial Sequence
  Description of Artificial Sequence:  Enzymatic Nucleic acid
caggagggcugaugaggccguuaggccgaaaguccgug

SEQ ID NO: 4160 - RNA, 38 nt, Artificial Sequence
  Description of Artificial Sequence:  Enzymatic Nucleic acid
gagcucagcugaugaggccguuaggccgaaaggggagu

SEQ ID NO: 4161 - RNA, 38 nt, Artificial Sequence
  Description of Artificial Sequence:  Enzymatic Nucleic acid
cacucagacugaugaggccguuaggccgaaagcucagg

SEQ ID NO: 4162 - RNA, 38 nt, Artificial Sequence
  Description of Artificial Sequence:  Enzymatic Nucleic acid
ugcacucacugaugaggccguuaggccgaaagagcuca

SEQ ID NO: 4163 - RNA, 38 nt, Artificial Sequence
  Description of Artificial Sequence:  Enzymatic Nucleic acid
cacgguggcugaugaggccguuaggccgaaauuguugc

SEQ ID NO: 4164 - RNA, 38 nt, Artificial Sequence
  Description of Artificial Sequence:  Enzymatic Nucleic acid
ccacggugcugaugaggccguuaggccgaaaauuguug

SEQ ID NO: 4165 - RNA, 38 nt, Artificial Sequence
  Description of Artificial Sequence:  Enzymatic Nucleic acid
aucaaugccugaugaggccguuaggccgaaagccacgg

SEQ ID NO: 4166 - RNA, 38 nt, Artificial Sequence
  Description of Artificial Sequence:  Enzymatic Nucleic acid
uuucuauccugaugaggccguuaggccgaaaugcaagc

SEQ ID NO: 4167 - RNA, 38 nt, Artificial Sequence
  Description of Artificial Sequence:  Enzymatic Nucleic acid
cccauuuccugaugaggccguuaggccgaaaucaaugc

SEQ ID NO: 4168 - RNA, 38 nt, Artificial Sequence
  Description of Artificial Sequence:  Enzymatic Nucleic acid
cuugauggcugaugaggccguuaggccgaaacagcuuu

SEQ ID NO: 4169 - RNA, 38 nt, Artificial Sequence
  Description of Artificial Sequence:  Enzymatic Nucleic acid
ucuuccuucugaugaggccguuaggccgaaaugggaca

SEQ ID NO: 4170 - RNA, 38 nt, Artificial Sequence
  Description of Artificial Sequence:  Enzymatic Nucleic acid
gcugcaagcugaugaggccguuaggccgaaagcugucu

SEQ ID NO: 4171 - RNA, 38 nt, Artificial Sequence
  Description of Artificial Sequence:  Enzymatic Nucleic acid
cgcugcaacugaugaggccguuaggccgaaaagcuguc

SEQ ID NO: 4172 - RNA, 38 nt, Artificial Sequence
  Description of Artificial Sequence:  Enzymatic Nucleic acid
aucgcugccugaugaggccguuaggccgaaagaagcug

SEQ ID NO: 4173 - RNA, 38 nt, Artificial Sequence
  Description of Artificial Sequence:  Enzymatic Nucleic acid
cugagcugcugaugaggccguuaggccgaaaucgcugc

SEQ ID NO: 4174 - RNA, 38 nt, Artificial Sequence
  Description of Artificial Sequence:  Enzymatic Nucleic acid
uggggucucugaugaggccguuaggccgaaagcuguau

SEQ ID NO: 4175 - RNA, 38 nt, Artificial Sequence
  Description of Artificial Sequence:  Enzymatic Nucleic acid
ccucaguccugaugaggccguuaggccgaaaggcgccu

SEQ ID NO: 4176 - RNA, 38 nt, Artificial Sequence
  Description of Artificial Sequence:  Enzymatic Nucleic acid
gugucguccugaugaggccguuaggccgaaaugcuguc

SEQ ID NO: 4177 - RNA, 38 nt, Artificial Sequence
  Description of Artificial Sequence:  Enzymatic Nucleic acid
cugggaggcugaugaggccguuaggccgaaaggugucg

SEQ ID NO: 4178 - RNA, 38 nt, Artificial Sequence
  Description of Artificial Sequence:  Enzymatic Nucleic acid
acugggagcugaugaggccguuaggccgaaaagguguc

SEQ ID NO: 4179 - RNA, 38 nt, Artificial Sequence
  Description of Artificial Sequence:  Enzymatic Nucleic acid
ggcacuggcugaugaggccguuaggccgaaaggaaggu

SEQ ID NO: 4180 - RNA, 38 nt, Artificial Sequence
  Description of Artificial Sequence:  Enzymatic Nucleic acid
gguuuaugcugaugaggccguuaggccgaaauucaggc

SEQ ID NO: 4181 - RNA, 38 nt, Artificial Sequence
  Description of Artificial Sequence:  Enzymatic Nucleic acid
gacugguucugaugaggccguuaggccgaaauguauuc

SEQ ID NO: 4182 - RNA, 38 nt, Artificial Sequence
  Description of Artificial Sequence:  Enzymatic Nucleic acid
ugggaacgcugaugaggccguuaggccgaaacugguuu

SEQ ID NO: 4183 - RNA, 38 nt, Artificial Sequence
  Description of Artificial Sequence:  Enzymatic Nucleic acid
cuuuugggcugaugaggccguuaggccgaaacggacug

SEQ ID NO: 4184 - RNA, 38 nt, Artificial Sequence
  Description of Artificial Sequence:  Enzymatic Nucleic acid
ccuuuuggcugaugaggccguuaggccgaaaacggacu

SEQ ID NO: 4185 - RNA, 38 nt, Artificial Sequence
  Description of Artificial Sequence:  Enzymatic Nucleic acid
ucugcacacugaugaggccguuaggccgaaagccagcg

SEQ ID NO: 4186 - RNA, 38 nt, Artificial Sequence
  Description of Artificial Sequence:  Enzymatic Nucleic acid
auagacagcugaugaggccguuaggccgaaauucugca

SEQ ID NO: 4187 - RNA, 38 nt, Artificial Sequence
  Description of Artificial Sequence:  Enzymatic Nucleic acid
uugugauacugaugaggccguuaggccgaaacaggauu

SEQ ID NO: 4188 - RNA, 38 nt, Artificial Sequence
  Description of Artificial Sequence:  Enzymatic Nucleic acid
gauugugacugaugaggccguuaggccgaaagacagga

SEQ ID NO: 4189 - RNA, 38 nt, Artificial Sequence
  Description of Artificial Sequence:  Enzymatic Nucleic acid
cugauugucugaugaggccguuaggccgaaauagacag

SEQ ID NO: 4190 - RNA, 38 nt, Artificial Sequence
  Description of Artificial Sequence:  Enzymatic Nucleic acid
cagaggcucugaugaggccguuaggccgaaauugugau

SEQ ID NO: 4191 - RNA, 38 nt, Artificial Sequence
  Description of Artificial Sequence:  Enzymatic Nucleic acid
gggguucacugaugaggccguuaggccgaaaggcugau

SEQ ID NO: 4192 - RNA, 38 nt, Artificial Sequence
  Description of Artificial Sequence:  Enzymatic Nucleic acid
gguccuggcugaugaggccguuaggccgaaaguguggg

SEQ ID NO: 4193 - RNA, 38 nt, Artificial Sequence
  Description of Artificial Sequence:  Enzymatic Nucleic acid
uguugagacugaugaggccguuaggccgaaacucgggg

SEQ ID NO: 4194 - RNA, 38 nt, Artificial Sequence
  Description of Artificial Sequence:  Enzymatic Nucleic acid
aguguugacugaugaggccguuaggccgaaauacucgg

SEQ ID NO: 4195 - RNA, 38 nt, Artificial Sequence
  Description of Artificial Sequence:  Enzymatic Nucleic acid
acaguguucugaugaggccguuaggccgaaagauacuc

SEQ ID NO: 4196 - RNA, 38 nt, Artificial Sequence
  Description of Artificial Sequence:  Enzymatic Nucleic acid
gugggcugcugaugaggccguuaggccgaaacaguguu

SEQ ID NO: 4197 - RNA, 38 nt, Artificial Sequence
  Description of Artificial Sequence:  Enzymatic Nucleic acid
gugcuguucugaugaggccguuaggccgaaacacaggu

SEQ ID NO: 4198 - RNA, 38 nt, Artificial Sequence
  Description of Artificial Sequence:  Enzymatic Nucleic acid
ggcugucgcugaugaggccguuaggccgaaaugugcug

SEQ ID NO: 4199 - RNA, 38 nt, Artificial Sequence
  Description of Artificial Sequence:  Enzymatic Nucleic acid
gggcuguccugaugaggccguuaggccgaaaaugugcu

SEQ ID NO: 4200 - RNA, 38 nt, Artificial Sequence
  Description of Artificial Sequence:  Enzymatic Nucleic acid
uccaggcucugaugaggccguuaggccgaaauuuggug

SEQ ID NO: 4201 - RNA, 38 nt, Artificial Sequence
  Description of Artificial Sequence:  Enzymatic Nucleic acid
guccaggccugaugaggccguuaggccgaaaauuuggu

SEQ ID NO: 4202 - RNA, 38 nt, Artificial Sequence
  Description of Artificial Sequence:  Enzymatic Nucleic acid
ccugcuggcugaugaggccguuaggccgaaagucaggg

SEQ ID NO: 4203 - RNA, 38 nt, Artificial Sequence
  Description of Artificial Sequence:  Enzymatic Nucleic acid
ugggaaagcugaugaggccguuaggccgaaaguccugc

SEQ ID NO: 4204 - RNA, 38 nt, Artificial Sequence
  Description of Artificial Sequence:  Enzymatic Nucleic acid
uugggaaacugaugaggccguuaggccgaaaaguccug

SEQ ID NO: 4205 - RNA, 38 nt, Artificial Sequence
  Description of Artificial Sequence:  Enzymatic Nucleic acid
ccuugggacugaugaggccguuaggccgaaagaagucc

SEQ ID NO: 4206 - RNA, 38 nt, Artificial Sequence
  Description of Artificial Sequence:  Enzymatic Nucleic acid
uccuugggcugaugaggccguuaggccgaaaagaaguc

SEQ ID NO: 4207 - RNA, 38 nt, Artificial Sequence
  Description of Artificial Sequence:  Enzymatic Nucleic acid
uuccuuggcugaugaggccguuaggccgaaaaagaagu

SEQ ID NO: 4208 - RNA, 38 nt, Artificial Sequence
  Description of Artificial Sequence:  Enzymatic Nucleic acid
cccuuaaacugaugaggccguuaggccgaaaugccauu

SEQ ID NO: 4209 - RNA, 38 nt, Artificial Sequence
  Description of Artificial Sequence:  Enzymatic Nucleic acid
agcccuuacugaugaggccguuaggccgaaagaugcca

SEQ ID NO: 4210 - RNA, 38 nt, Artificial Sequence
  Description of Artificial Sequence:  Enzymatic Nucleic acid
gagcccuucugaugaggccguuaggccgaaaagaugcc

SEQ ID NO: 4211 - RNA, 38 nt, Artificial Sequence
  Description of Artificial Sequence:  Enzymatic Nucleic acid
ggagcccucugaugaggccguuaggccgaaaaagaugc

SEQ ID NO: 4212 - RNA, 38 nt, Artificial Sequence
  Description of Artificial Sequence:  Enzymatic Nucleic acid
cagcugugcugaugaggccguuaggccgaaagcccuua

SEQ ID NO: 4213 - RNA, 38 nt, Artificial Sequence
  Description of Artificial Sequence:  Enzymatic Nucleic acid
cccuuaggcugaugaggccguuaggccgaaauucugca

SEQ ID NO: 4214 - RNA, 38 nt, Artificial Sequence
  Description of Artificial Sequence:  Enzymatic Nucleic acid
gcgacccucugaugaggccguuaggccgaaagguauuc

SEQ ID NO: 4215 - RNA, 38 nt, Artificial Sequence
  Description of Artificial Sequence:  Enzymatic Nucleic acid
uguggcgccugaugaggccguuaggccgaaacccuuag

SEQ ID NO: 4216 - RNA, 38 nt, Artificial Sequence
  Description of Artificial Sequence:  Enzymatic Nucleic acid
cuccaauacugaugaggccguuaggccgaaauucacug

SEQ ID NO: 4217 - RNA, 38 nt, Artificial Sequence
  Description of Artificial Sequence:  Enzymatic Nucleic acid
gcuccaaucugaugaggccguuaggccgaaaauucacu

SEQ ID NO: 4218 - RNA, 38 nt, Artificial Sequence
  Description of Artificial Sequence:  Enzymatic Nucleic acid
ugcuccaacugaugaggccguuaggccgaaaaauucac

SEQ ID NO: 4219 - RNA, 38 nt, Artificial Sequence
  Description of Artificial Sequence:  Enzymatic Nucleic acid
caugcucccugaugaggccguuaggccgaaauaaauuc

SEQ ID NO: 4220 - RNA, 38 nt, Artificial Sequence
  Description of Artificial Sequence:  Enzymatic Nucleic acid
gcucauaccugaugaggccguuaggccgaaauccuccg

SEQ ID NO: 4221 - RNA, 38 nt, Artificial Sequence
  Description of Artificial Sequence:  Enzymatic Nucleic acid
agggcucacugaugaggccguuaggccgaaacuauccu

SEQ ID NO: 4222 - RNA, 38 nt, Artificial Sequence
  Description of Artificial Sequence:  Enzymatic Nucleic acid
uggauuuucugaugaggccguuaggccgaaagggcuca

SEQ ID NO: 4223 - RNA, 38 nt, Artificial Sequence
  Description of Artificial Sequence:  Enzymatic Nucleic acid
agagucugcugaugaggccguuaggccgaaauuuuuag

SEQ ID NO: 4224 - RNA, 38 nt, Artificial Sequence
  Description of Artificial Sequence:  Enzymatic Nucleic acid
uaucgaaacugaugaggccguuaggccgaaagucugga

SEQ ID NO: 4225 - RNA, 38 nt, Artificial Sequence
  Description of Artificial Sequence:  Enzymatic Nucleic acid
gguaucgacugaugaggccguuaggccgaaagagucug

SEQ ID NO: 4226 - RNA, 38 nt, Artificial Sequence
  Description of Artificial Sequence:  Enzymatic Nucleic acid
ggguaucgcugaugaggccguuaggccgaaaagagucu

SEQ ID NO: 4227 - RNA, 38 nt, Artificial Sequence
  Description of Artificial Sequence:  Enzymatic Nucleic acid
uggguauccugaugaggccguuaggccgaaaaagaguc

SEQ ID NO: 4228 - RNA, 38 nt, Artificial Sequence
  Description of Artificial Sequence:  Enzymatic Nucleic acid
guccugggcugaugaggccguuaggccgaaaucgaaag

SEQ ID NO: 4229 - RNA, 38 nt, Artificial Sequence
  Description of Artificial Sequence:  Enzymatic Nucleic acid
ggauggagcugaugaggccguuaggccgaaaccugcug

SEQ ID NO: 4230 - RNA, 38 nt, Artificial Sequence
  Description of Artificial Sequence:  Enzymatic Nucleic acid
uugggaugcugaugaggccguuaggccgaaaggaccug

SEQ ID NO: 4231 - RNA, 38 nt, Artificial Sequence
  Description of Artificial Sequence:  Enzymatic Nucleic acid
gcuguuggcugaugaggccguuaggccgaaauggagga

SEQ ID NO: 4232 - RNA, 38 nt, Artificial Sequence
  Description of Artificial Sequence:  Enzymatic Nucleic acid
uaagagcucugaugaggccguuaggccgaaaugcgggc

SEQ ID NO: 4233 - RNA, 38 nt, Artificial Sequence
  Description of Artificial Sequence:  Enzymatic Nucleic acid
cuaagagccugaugaggccguuaggccgaaaaugcggg

SEQ ID NO: 4234 - RNA, 38 nt, Artificial Sequence
  Description of Artificial Sequence:  Enzymatic Nucleic acid
gggucuaacugaugaggccguuaggccgaaagcuaaug

SEQ ID NO: 4235 - RNA, 38 nt, Artificial Sequence
  Description of Artificial Sequence:  Enzymatic Nucleic acid
gugggucucugaugaggccguuaggccgaaagagcuaa

SEQ ID NO: 4236 - RNA, 38 nt, Artificial Sequence
  Description of Artificial Sequence:  Enzymatic Nucleic acid
uguggguccugaugaggccguuaggccgaaaagagcua

SEQ ID NO: 4237 - RNA, 38 nt, Artificial Sequence
  Description of Artificial Sequence:  Enzymatic Nucleic acid
cguugcaacugaugaggccguuaggccgaaaccagucu

SEQ ID NO: 4238 - RNA, 38 nt, Artificial Sequence
  Description of Artificial Sequence:  Enzymatic Nucleic acid
acguugcacugaugaggccguuaggccgaaaaccaguc

SEQ ID NO: 4239 - RNA, 38 nt, Artificial Sequence
  Description of Artificial Sequence:  Enzymatic Nucleic acid
aacguugccugaugaggccguuaggccgaaaaaccagu

SEQ ID NO: 4240 - RNA, 38 nt, Artificial Sequence
  Description of Artificial Sequence:  Enzymatic Nucleic acid
ucgguguacugaugaggccguuaggccgaaacguugca

SEQ ID NO: 4241 - RNA, 38 nt, Artificial Sequence
  Description of Artificial Sequence:  Enzymatic Nucleic acid
gucggugucugaugaggccguuaggccgaaaacguugc

SEQ ID NO: 4242 - RNA, 38 nt, Artificial Sequence
  Description of Artificial Sequence:  Enzymatic Nucleic acid
agucggugcugaugaggccguuaggccgaaaaacguug

SEQ ID NO: 4243 - RNA, 38 nt, Artificial Sequence
  Description of Artificial Sequence:  Enzymatic Nucleic acid
uuccuggccugaugaggccguuaggccgaaagucggug

SEQ ID NO: 4244 - RNA, 38 nt, Artificial Sequence
  Description of Artificial Sequence:  Enzymatic Nucleic acid
gguggaagcugaugaggccguuaggccgaaacuuccug

SEQ ID NO: 4245 - RNA, 38 nt, Artificial Sequence
  Description of Artificial Sequence:  Enzymatic Nucleic acid
cgagguggcugaugaggccguuaggccgaaaguacuuc

SEQ ID NO: 4246 - RNA, 38 nt, Artificial Sequence
  Description of Artificial Sequence:  Enzymatic Nucleic acid
ccgaggugcugaugaggccguuaggccgaaaaguacuu

SEQ ID NO: 4247 - RNA, 38 nt, Artificial Sequence
  Description of Artificial Sequence:  Enzymatic Nucleic acid
augugccccugaugaggccguuaggccgaaagguggaa

SEQ ID NO: 4248 - RNA, 38 nt, Artificial Sequence
  Description of Artificial Sequence:  Enzymatic Nucleic acid
cuucccaacugaugaggccguuaggccgaaaugugccc

SEQ ID NO: 4249 - RNA, 38 nt, Artificial Sequence
  Description of Artificial Sequence:  Enzymatic Nucleic acid
acuucccacugaugaggccguuaggccgaaaaugugcc

SEQ ID NO: 4250 - RNA, 38 nt, Artificial Sequence
  Description of Artificial Sequence:  Enzymatic Nucleic acid
aacuuccccugaugaggccguuaggccgaaaaaugugc

SEQ ID NO: 4251 - RNA, 38 nt, Artificial Sequence
  Description of Artificial Sequence:  Enzymatic Nucleic acid
aggaaugccugaugaggccguuaggccgaaacuuccca

SEQ ID NO: 4252 - RNA, 38 nt, Artificial Sequence
  Description of Artificial Sequence:  Enzymatic Nucleic acid
gacaaaggcugaugaggccguuaggccgaaaugcaacu

SEQ ID NO: 4253 - RNA, 38 nt, Artificial Sequence
  Description of Artificial Sequence:  Enzymatic Nucleic acid
agacaaagcugaugaggccguuaggccgaaaaugcaac

SEQ ID NO: 4254 - RNA, 38 nt, Artificial Sequence
  Description of Artificial Sequence:  Enzymatic Nucleic acid
ugaagacacugaugaggccguuaggccgaaaggaaugc

SEQ ID NO: 4255 - RNA, 38 nt, Artificial Sequence
  Description of Artificial Sequence:  Enzymatic Nucleic acid
uugaagaccugaugaggccguuaggccgaaaaggaaug

SEQ ID NO: 4256 - RNA, 38 nt, Artificial Sequence
  Description of Artificial Sequence:  Enzymatic Nucleic acid
aguuugaacugaugaggccguuaggccgaaacaaagga

SEQ ID NO: 4257 - RNA, 38 nt, Artificial Sequence
  Description of Artificial Sequence:  Enzymatic Nucleic acid
acaguuugcugaugaggccguuaggccgaaagacaaag

SEQ ID NO: 4258 - RNA, 38 nt, Artificial Sequence
  Description of Artificial Sequence:  Enzymatic Nucleic acid
cacaguuucugaugaggccguuaggccgaaaagacaaa

SEQ ID NO: 4259 - RNA, 38 nt, Artificial Sequence
  Description of Artificial Sequence:  Enzymatic Nucleic acid
uuucuguacugaugaggccguuaggccgaaaugcuuca

SEQ ID NO: 4260 - RNA, 38 nt, Artificial Sequence
  Description of Artificial Sequence:  Enzymatic Nucleic acid
guuucugucugaugaggccguuaggccgaaaaugcuuc

SEQ ID NO: 4261 - RNA, 38 nt, Artificial Sequence
  Description of Artificial Sequence:  Enzymatic Nucleic acid
cguuucugcugaugaggccguuaggccgaaaaaugcuu

SEQ ID NO: 4262 - RNA, 38 nt, Artificial Sequence
  Description of Artificial Sequence:  Enzymatic Nucleic acid
ucuugcugcugaugaggccguuaggccgaaaugcguuu

SEQ ID NO: 4263 - RNA, 38 nt, Artificial Sequence
  Description of Artificial Sequence:  Enzymatic Nucleic acid
agggacaacugaugaggccguuaggccgaaauucuugc

SEQ ID NO: 4264 - RNA, 38 nt, Artificial Sequence
  Description of Artificial Sequence:  Enzymatic Nucleic acid
aaagggaccugaugaggccguuaggccgaaauauucuu

SEQ ID NO: 4265 - RNA, 38 nt, Artificial Sequence
  Description of Artificial Sequence:  Enzymatic Nucleic acid
cucaaaggcugaugaggccguuaggccgaaacaauauu

SEQ ID NO: 4266 - RNA, 38 nt, Artificial Sequence
  Description of Artificial Sequence:  Enzymatic Nucleic acid
ucugcucacugaugaggccguuaggccgaaagggacaa

SEQ ID NO: 4267 - RNA, 38 nt, Artificial Sequence
  Description of Artificial Sequence:  Enzymatic Nucleic acid
uucugcuccugaugaggccguuaggccgaaaagggaca

SEQ ID NO: 4268 - RNA, 38 nt, Artificial Sequence
  Description of Artificial Sequence:  Enzymatic Nucleic acid
gaaagauacugaugaggccguuaggccgaaauuucugc

SEQ ID NO: 4269 - RNA, 38 nt, Artificial Sequence
  Description of Artificial Sequence:  Enzymatic Nucleic acid
ugaaagaucugaugaggccguuaggccgaaaauuucug

SEQ ID NO: 4270 - RNA, 38 nt, Artificial Sequence
  Description of Artificial Sequence:  Enzymatic Nucleic acid
uugaaagacugaugaggccguuaggccgaaaaauuucu

SEQ ID NO: 4271 - RNA, 38 nt, Artificial Sequence
  Description of Artificial Sequence:  Enzymatic Nucleic acid
cuuugaaacugaugaggccguuaggccgaaauaaauuu

SEQ ID NO: 4272 - RNA, 38 nt, Artificial Sequence
  Description of Artificial Sequence:  Enzymatic Nucleic acid
cucuuugacugaugaggccguuaggccgaaagauaaau

SEQ ID NO: 4273 - RNA, 38 nt, Artificial Sequence
  Description of Artificial Sequence:  Enzymatic Nucleic acid
ccucuuugcugaugaggccguuaggccgaaaagauaaa

SEQ ID NO: 4274 - RNA, 38 nt, Artificial Sequence
  Description of Artificial Sequence:  Enzymatic Nucleic acid
accucuuucugaugaggccguuaggccgaaaaagauaa

SEQ ID NO: 4275 - RNA, 38 nt, Artificial Sequence
  Description of Artificial Sequence:  Enzymatic Nucleic acid
uucaaauacugaugaggccguuaggccgaaaccucuuu

SEQ ID NO: 4276 - RNA, 38 nt, Artificial Sequence
  Description of Artificial Sequence:  Enzymatic Nucleic acid
uuuucaaacugaugaggccguuaggccgaaauaccucu

SEQ ID NO: 4277 - RNA, 38 nt, Artificial Sequence
  Description of Artificial Sequence:  Enzymatic Nucleic acid
uuuuuucacugaugaggccguuaggccgaaauauaccu

SEQ ID NO: 4278 - RNA, 38 nt, Artificial Sequence
  Description of Artificial Sequence:  Enzymatic Nucleic acid
uuuuuuuccugaugaggccguuaggccgaaaauauacc

SEQ ID NO: 4279 - RNA, 38 nt, Artificial Sequence
  Description of Artificial Sequence:  Enzymatic Nucleic acid
cucacauacugaugaggccguuaggccgaaacuuuuuu

SEQ ID NO: 4280 - RNA, 38 nt, Artificial Sequence
  Description of Artificial Sequence:  Enzymatic Nucleic acid
uccucacacugaugaggccguuaggccgaaauacuuuu

SEQ ID NO: 4281 - RNA, 38 nt, Artificial Sequence
  Description of Artificial Sequence:  Enzymatic Nucleic acid
ucaauaaacugaugaggccguuaggccgaaauccucac

SEQ ID NO: 4282 - RNA, 38 nt, Artificial Sequence
  Description of Artificial Sequence:  Enzymatic Nucleic acid
aucaauaacugaugaggccguuaggccgaaaauccuca

SEQ ID NO: 4283 - RNA, 38 nt, Artificial Sequence
  Description of Artificial Sequence:  Enzymatic Nucleic acid
aaucaauacugaugaggccguuaggccgaaaaauccuc

SEQ ID NO: 4284 - RNA, 38 nt, Artificial Sequence
  Description of Artificial Sequence:  Enzymatic Nucleic acid
caaucaaucugaugaggccguuaggccgaaaaaauccu

SEQ ID NO: 4285 - RNA, 38 nt, Artificial Sequence
  Description of Artificial Sequence:  Enzymatic Nucleic acid
ccaaucaacugaugaggccguuaggccgaaaaaaaucc

SEQ ID NO: 4286 - RNA, 38 nt, Artificial Sequence
  Description of Artificial Sequence:  Enzymatic Nucleic acid
ccccaauccugaugaggccguuaggccgaaauaaaaau

SEQ ID NO: 4287 - RNA, 38 nt, Artificial Sequence
  Description of Artificial Sequence:  Enzymatic Nucleic acid
agaucccccugaugaggccguuaggccgaaaucaauaa

SEQ ID NO: 4288 - RNA, 38 nt, Artificial Sequence
  Description of Artificial Sequence:  Enzymatic Nucleic acid
aacuccaacugaugaggccguuaggccgaaauccccaa

SEQ ID NO: 4289 - RNA, 38 nt, Artificial Sequence
  Description of Artificial Sequence:  Enzymatic Nucleic acid
aaaacucccugaugaggccguuaggccgaaagaucccc

SEQ ID NO: 4290 - RNA, 38 nt, Artificial Sequence
  Description of Artificial Sequence:  Enzymatic Nucleic acid
caaugaaacugaugaggccguuaggccgaaacuccaag

SEQ ID NO: 4291 - RNA, 38 nt, Artificial Sequence
  Description of Artificial Sequence:  Enzymatic Nucleic acid
acaaugaacugaugaggccguuaggccgaaaacuccaa

SEQ ID NO: 4292 - RNA, 38 nt, Artificial Sequence
  Description of Artificial Sequence:  Enzymatic Nucleic acid
gacaaugacugaugaggccguuaggccgaaaaacucca

SEQ ID NO: 4293 - RNA, 38 nt, Artificial Sequence
  Description of Artificial Sequence:  Enzymatic Nucleic acid
cgacaaugcugaugaggccguuaggccgaaaaaacucc

SEQ ID NO: 4294 - RNA, 38 nt, Artificial Sequence
  Description of Artificial Sequence:  Enzymatic Nucleic acid
gcgacaaucugaugaggccguuaggccgaaaaaaacuc

SEQ ID NO: 4295 - RNA, 38 nt, Artificial Sequence
  Description of Artificial Sequence:  Enzymatic Nucleic acid
auagcgaccugaugaggccguuaggccgaaaugaaaaa

SEQ ID NO: 4296 - RNA, 38 nt, Artificial Sequence
  Description of Artificial Sequence:  Enzymatic Nucleic acid
ucaauagccugaugaggccguuaggccgaaacaaugaa

SEQ ID NO: 4297 - RNA, 38 nt, Artificial Sequence
  Description of Artificial Sequence:  Enzymatic Nucleic acid
aaaaucaacugaugaggccguuaggccgaaagcgacaa

SEQ ID NO: 4298 - RNA, 38 nt, Artificial Sequence
  Description of Artificial Sequence:  Enzymatic Nucleic acid
uaaaaauccugaugaggccguuaggccgaaauagcgac

SEQ ID NO: 4299 - RNA, 38 nt, Artificial Sequence
  Description of Artificial Sequence:  Enzymatic Nucleic acid
gaaguaaacugaugaggccguuaggccgaaaucaauag

SEQ ID NO: 4300 - RNA, 38 nt, Artificial Sequence
  Description of Artificial Sequence:  Enzymatic Nucleic acid
ugaaguaacugaugaggccguuaggccgaaaaucaaua

SEQ ID NO: 4301 - RNA, 38 nt, Artificial Sequence
  Description of Artificial Sequence:  Enzymatic Nucleic acid
uugaaguacugaugaggccguuaggccgaaaaaucaau

SEQ ID NO: 4302 - RNA, 38 nt, Artificial Sequence
  Description of Artificial Sequence:  Enzymatic Nucleic acid
auugaagucugaugaggccguuaggccgaaaaaaucaa

SEQ ID NO: 4303 - RNA, 38 nt, Artificial Sequence
  Description of Artificial Sequence:  Enzymatic Nucleic acid
cauugaagcugaugaggccguuaggccgaaaaaaauca

SEQ ID NO: 4304 - RNA, 38 nt, Artificial Sequence
  Description of Artificial Sequence:  Enzymatic Nucleic acid
gcccauugcugaugaggccguuaggccgaaaguaaaaa

SEQ ID NO: 4305 - RNA, 38 nt, Artificial Sequence
  Description of Artificial Sequence:  Enzymatic Nucleic acid
agcccauucugaugaggccguuaggccgaaaaguaaaa

SEQ ID NO: 4306 - RNA, 38 nt, Artificial Sequence
  Description of Artificial Sequence:  Enzymatic Nucleic acid
uguuggaacugaugaggccguuaggccgaaagcccauu

SEQ ID NO: 4307 - RNA, 38 nt, Artificial Sequence
  Description of Artificial Sequence:  Enzymatic Nucleic acid
cuuguuggcugaugaggccguuaggccgaaagagccca

SEQ ID NO: 4308 - RNA, 38 nt, Artificial Sequence
  Description of Artificial Sequence:  Enzymatic Nucleic acid
ccuuguugcugaugaggccguuaggccgaaaagagccc

SEQ ID NO: 4309 - RNA, 38 nt, Artificial Sequence
  Description of Artificial Sequence:  Enzymatic Nucleic acid
cuaccagccugaugaggccguuaggccgaaagcuucuu

SEQ ID NO: 4310 - RNA, 38 nt, Artificial Sequence
  Description of Artificial Sequence:  Enzymatic Nucleic acid
gcaagugccugaugaggccguuaggccgaaaccagcaa

SEQ ID NO: 4311 - RNA, 38 nt, Artificial Sequence
  Description of Artificial Sequence:  Enzymatic Nucleic acid
aggguagccugaugaggccguuaggccgaaagugcuac

SEQ ID NO: 4312 - RNA, 38 nt, Artificial Sequence
  Description of Artificial Sequence:  Enzymatic Nucleic acid
acucagggcugaugaggccguuaggccgaaagcaagug

SEQ ID NO: 4313 - RNA, 38 nt, Artificial Sequence
  Description of Artificial Sequence:  Enzymatic Nucleic acid
ccuggaugcugaugaggccguuaggccgaaacucaggg

SEQ ID NO: 4314 - RNA, 38 nt, Artificial Sequence
  Description of Artificial Sequence:  Enzymatic Nucleic acid
gccuggaucugaugaggccguuaggccgaaaacucagg

SEQ ID NO: 4315 - RNA, 38 nt, Artificial Sequence
  Description of Artificial Sequence:  Enzymatic Nucleic acid
ugggccugcugaugaggccguuaggccgaaaugaacuc

SEQ ID NO: 4316 - RNA, 38 nt, Artificial Sequence
  Description of Artificial Sequence:  Enzymatic Nucleic acid
cucuggaacugaugaggccguuaggccgaaacuugugg

SEQ ID NO: 4317 - RNA, 38 nt, Artificial Sequence
  Description of Artificial Sequence:  Enzymatic Nucleic acid
uccucuggcugaugaggccguuaggccgaaagacuugu

SEQ ID NO: 4318 - RNA, 38 nt, Artificial Sequence
  Description of Artificial Sequence:  Enzymatic Nucleic acid
auccucugcugaugaggccguuaggccgaaaagacuug

SEQ ID NO: 4319 - RNA, 38 nt, Artificial Sequence
  Description of Artificial Sequence:  Enzymatic Nucleic acid
cuggaauccugaugaggccguuaggccgaaagcauccu

SEQ ID NO: 4320 - RNA, 38 nt, Artificial Sequence
  Description of Artificial Sequence:  Enzymatic Nucleic acid
accacuggcugaugaggccguuaggccgaaaucaagca

SEQ ID NO: 4321 - RNA, 38 nt, Artificial Sequence
  Description of Artificial Sequence:  Enzymatic Nucleic acid
aaccacugcugaugaggccguuaggccgaaaaucaagc

SEQ ID NO: 4322 - RNA, 38 nt, Artificial Sequence
  Description of Artificial Sequence:  Enzymatic Nucleic acid
ugaagcagcugaugaggccguuaggccgaaaccacugg

SEQ ID NO: 4323 - RNA, 38 nt, Artificial Sequence
  Description of Artificial Sequence:  Enzymatic Nucleic acid
uugaagcacugaugaggccguuaggccgaaaaccacug

SEQ ID NO: 4324 - RNA, 38 nt, Artificial Sequence
  Description of Artificial Sequence:  Enzymatic Nucleic acid
aagccuugcugaugaggccguuaggccgaaagcagaac

SEQ ID NO: 4325 - RNA, 38 nt, Artificial Sequence
  Description of Artificial Sequence:  Enzymatic Nucleic acid
gaagccuucugaugaggccguuaggccgaaaagcagaa

SEQ ID NO: 4326 - RNA, 38 nt, Artificial Sequence
  Description of Artificial Sequence:  Enzymatic Nucleic acid
ugcaguggcugaugaggccguuaggccgaaagccuuga

SEQ ID NO: 4327 - RNA, 38 nt, Artificial Sequence
  Description of Artificial Sequence:  Enzymatic Nucleic acid
uugcagugcugaugaggccguuaggccgaaaagccuug

SEQ ID NO: 4328 - RNA, 38 nt, Artificial Sequence
  Description of Artificial Sequence:  Enzymatic Nucleic acid
uggaucuucugaugaggccguuaggccgaaaguguuuu

SEQ ID NO: 4329 - RNA, 38 nt, Artificial Sequence
  Description of Artificial Sequence:  Enzymatic Nucleic acid
ccuucuugcugaugaggccguuaggccgaaaucuuuag

SEQ ID NO: 4330 - RNA, 38 nt, Artificial Sequence
  Description of Artificial Sequence:  Enzymatic Nucleic acid
gggccaugcugaugaggccguuaggccgaaaggccuuc

SEQ ID NO: 4331 - RNA, 38 nt, Artificial Sequence
  Description of Artificial Sequence:  Enzymatic Nucleic acid
ggggccaucugaugaggccguuaggccgaaaaggccuu

SEQ ID NO: 4332 - RNA, 38 nt, Artificial Sequence
  Description of Artificial Sequence:  Enzymatic Nucleic acid
acaguacccugaugaggccguuaggccgaaauccggcc

SEQ ID NO: 4333 - RNA, 38 nt, Artificial Sequence
  Description of Artificial Sequence:  Enzymatic Nucleic acid
ugauacagcugaugaggccguuaggccgaaaccgaucc

SEQ ID NO: 4334 - RNA, 38 nt, Artificial Sequence
  Description of Artificial Sequence:  Enzymatic Nucleic acid
ugacuugacugaugaggccguuaggccgaaacaguacc

SEQ ID NO: 4335 - RNA, 38 nt, Artificial Sequence
  Description of Artificial Sequence:  Enzymatic Nucleic acid
caugacuucugaugaggccguuaggccgaaauacagua

SEQ ID NO: 4336 - RNA, 38 nt, Artificial Sequence
  Description of Artificial Sequence:  Enzymatic Nucleic acid
ccugccaucugaugaggccguuaggccgaaacuugaua

SEQ ID NO: 4337 - RNA, 38 nt, Artificial Sequence
  Description of Artificial Sequence:  Enzymatic Nucleic acid
uccuacugcugaugaggccguuaggccgaaaccugcca

SEQ ID NO: 4338 - RNA, 38 nt, Artificial Sequence
  Description of Artificial Sequence:  Enzymatic Nucleic acid
gcuuaucccugaugaggccguuaggccgaaacuguacc

SEQ ID NO: 4339 - RNA, 38 nt, Artificial Sequence
  Description of Artificial Sequence:  Enzymatic Nucleic acid
gaguggcucugaugaggccguuaggccgaaauccuacu

SEQ ID NO: 4340 - RNA, 38 nt, Artificial Sequence
  Description of Artificial Sequence:  Enzymatic Nucleic acid
aagggacacugaugaggccguuaggccgaaaguggcuu

SEQ ID NO: 4341 - RNA, 38 nt, Artificial Sequence
  Description of Artificial Sequence:  Enzymatic Nucleic acid
caggaaggcugaugaggccguuaggccgaaacagagug

SEQ ID NO: 4342 - RNA, 38 nt, Artificial Sequence
  Description of Artificial Sequence:  Enzymatic Nucleic acid
ugcccaggcugaugaggccguuaggccgaaagggacag

SEQ ID NO: 4343 - RNA, 38 nt, Artificial Sequence
  Description of Artificial Sequence:  Enzymatic Nucleic acid
uugcccagcugaugaggccguuaggccgaaaagggaca

SEQ ID NO: 4344 - RNA, 38 nt, Artificial Sequence
  Description of Artificial Sequence:  Enzymatic Nucleic acid
uaaggaagcugaugaggccguuaggccgaaauucaucc

SEQ ID NO: 4345 - RNA, 38 nt, Artificial Sequence
  Description of Artificial Sequence:  Enzymatic Nucleic acid
cuaaggaacugaugaggccguuaggccgaaaauucauc

SEQ ID NO: 4346 - RNA, 38 nt, Artificial Sequence
  Description of Artificial Sequence:  Enzymatic Nucleic acid
gucuaaggcugaugaggccguuaggccgaaagaauuca

SEQ ID NO: 4347 - RNA, 38 nt, Artificial Sequence
  Description of Artificial Sequence:  Enzymatic Nucleic acid
agucuaagcugaugaggccguuaggccgaaaagaauuc

SEQ ID NO: 4348 - RNA, 38 nt, Artificial Sequence
  Description of Artificial Sequence:  Enzymatic Nucleic acid
guaagucucugaugaggccguuaggccgaaaggaagaa

SEQ ID NO: 4349 - RNA, 38 nt, Artificial Sequence
  Description of Artificial Sequence:  Enzymatic Nucleic acid
aguaaguccugaugaggccguuaggccgaaaaggaaga

SEQ ID NO: 4350 - RNA, 38 nt, Artificial Sequence
  Description of Artificial Sequence:  Enzymatic Nucleic acid
acaaaagucugaugaggccguuaggccgaaagucuaag

SEQ ID NO: 4351 - RNA, 38 nt, Artificial Sequence
  Description of Artificial Sequence:  Enzymatic Nucleic acid
uacaaaagcugaugaggccguuaggccgaaaagucuaa

SEQ ID NO: 4352 - RNA, 38 nt, Artificial Sequence
  Description of Artificial Sequence:  Enzymatic Nucleic acid
uuuuacaacugaugaggccguuaggccgaaaguaaguc

SEQ ID NO: 4353 - RNA, 38 nt, Artificial Sequence
  Description of Artificial Sequence:  Enzymatic Nucleic acid
uuuuuacacugaugaggccguuaggccgaaaaguaagu

SEQ ID NO: 4354 - RNA, 38 nt, Artificial Sequence
  Description of Artificial Sequence:  Enzymatic Nucleic acid
auuuuuaccugaugaggccguuaggccgaaaaaguaag

SEQ ID NO: 4355 - RNA, 38 nt, Artificial Sequence
  Description of Artificial Sequence:  Enzymatic Nucleic acid
gacauuuucugaugaggccguuaggccgaaacaaaagu

SEQ ID NO: 4356 - RNA, 38 nt, Artificial Sequence
  Description of Artificial Sequence:  Enzymatic Nucleic acid
accgugggcugaugaggccguuaggccgaaacauuuuu

SEQ ID NO: 4357 - RNA, 38 nt, Artificial Sequence
  Description of Artificial Sequence:  Enzymatic Nucleic acid
ggaguaagcugaugaggccguuaggccgaaaccguggg

SEQ ID NO: 4358 - RNA, 38 nt, Artificial Sequence
  Description of Artificial Sequence:  Enzymatic Nucleic acid
uggggagucugaugaggccguuaggccgaaaguaccgu

SEQ ID NO: 4359 - RNA, 38 nt, Artificial Sequence
  Description of Artificial Sequence:  Enzymatic Nucleic acid
guggggagcugaugaggccguuaggccgaaaaguaccg

SEQ ID NO: 4360 - RNA, 38 nt, Artificial Sequence
  Description of Artificial Sequence:  Enzymatic Nucleic acid
ucagugggcugaugaggccguuaggccgaaaguaagua

SEQ ID NO: 4361 - RNA, 38 nt, Artificial Sequence
  Description of Artificial Sequence:  Enzymatic Nucleic acid
ugacuggacugaugaggccguuaggccgaaaccacugg

SEQ ID NO: 4362 - RNA, 38 nt, Artificial Sequence
  Description of Artificial Sequence:  Enzymatic Nucleic acid
augacuggcugaugaggccguuaggccgaaaaccacug

SEQ ID NO: 4363 - RNA, 38 nt, Artificial Sequence
  Description of Artificial Sequence:  Enzymatic Nucleic acid
caugacugcugaugaggccguuaggccgaaaaaccacu

SEQ ID NO: 4364 - RNA, 38 nt, Artificial Sequence
  Description of Artificial Sequence:  Enzymatic Nucleic acid
acgcucaucugaugaggccguuaggccgaaacuggaaa

SEQ ID NO: 4365 - RNA, 38 nt, Artificial Sequence
  Description of Artificial Sequence:  Enzymatic Nucleic acid
gucagucucugaugaggccguuaggccgaaacgcucau

SEQ ID NO: 4366 - RNA, 38 nt, Artificial Sequence
  Description of Artificial Sequence:  Enzymatic Nucleic acid
agucaguccugaugaggccguuaggccgaaaacgcuca

SEQ ID NO: 4367 - RNA, 38 nt, Artificial Sequence
  Description of Artificial Sequence:  Enzymatic Nucleic acid
agacaaaccugaugaggccguuaggccgaaagucaguc

SEQ ID NO: 4368 - RNA, 38 nt, Artificial Sequence
  Description of Artificial Sequence:  Enzymatic Nucleic acid
ggaagacacugaugaggccguuaggccgaaacaaguca

SEQ ID NO: 4369 - RNA, 38 nt, Artificial Sequence
  Description of Artificial Sequence:  Enzymatic Nucleic acid
uggaagaccugaugaggccguuaggccgaaaacaaguc

SEQ ID NO: 4370 - RNA, 38 nt, Artificial Sequence
  Description of Artificial Sequence:  Enzymatic Nucleic acid
gaauggaacugaugaggccguuaggccgaaacaaacaa

SEQ ID NO: 4371 - RNA, 38 nt, Artificial Sequence
  Description of Artificial Sequence:  Enzymatic Nucleic acid
uggaauggcugaugaggccguuaggccgaaagacaaac

SEQ ID NO: 4372 - RNA, 38 nt, Artificial Sequence
  Description of Artificial Sequence:  Enzymatic Nucleic acid
auggaaugcugaugaggccguuaggccgaaaagacaaa

SEQ ID NO: 4373 - RNA, 38 nt, Artificial Sequence
  Description of Artificial Sequence:  Enzymatic Nucleic acid
aacaauggcugaugaggccguuaggccgaaauggaaga

SEQ ID NO: 4374 - RNA, 38 nt, Artificial Sequence
  Description of Artificial Sequence:  Enzymatic Nucleic acid
aaacaaugcugaugaggccguuaggccgaaaauggaag

SEQ ID NO: 4375 - RNA, 38 nt, Artificial Sequence
  Description of Artificial Sequence:  Enzymatic Nucleic acid
uucaaaaccugaugaggccguuaggccgaaauggaaug

SEQ ID NO: 4376 - RNA, 38 nt, Artificial Sequence
  Description of Artificial Sequence:  Enzymatic Nucleic acid
aguuucaacugaugaggccguuaggccgaaacaaugga

SEQ ID NO: 4377 - RNA, 38 nt, Artificial Sequence
  Description of Artificial Sequence:  Enzymatic Nucleic acid
gaguuucacugaugaggccguuaggccgaaaacaaugg

SEQ ID NO: 4378 - RNA, 38 nt, Artificial Sequence
  Description of Artificial Sequence:  Enzymatic Nucleic acid
ugaguuuccugaugaggccguuaggccgaaaaacaaug

SEQ ID NO: 4379 - RNA, 38 nt, Artificial Sequence
  Description of Artificial Sequence:  Enzymatic Nucleic acid
ggcauacucugaugaggccguuaggccgaaaguuucaa

SEQ ID NO: 4380 - RNA, 38 nt, Artificial Sequence
  Description of Artificial Sequence:  Enzymatic Nucleic acid
gggcggcacugaugaggccguuaggccgaaacugaguu

SEQ ID NO: 4381 - RNA, 38 nt, Artificial Sequence
  Description of Artificial Sequence:  Enzymatic Nucleic acid
gacagcaacugaugaggccguuaggccgaaacaggggc

SEQ ID NO: 4382 - RNA, 38 nt, Artificial Sequence
  Description of Artificial Sequence:  Enzymatic Nucleic acid
augacagccugaugaggccguuaggccgaaagacaggg

SEQ ID NO: 4383 - RNA, 38 nt, Artificial Sequence
  Description of Artificial Sequence:  Enzymatic Nucleic acid
gauuucaucugaugaggccguuaggccgaaacagcaag

SEQ ID NO: 4384 - RNA, 38 nt, Artificial Sequence
  Description of Artificial Sequence:  Enzymatic Nucleic acid
cucuugcucugaugaggccguuaggccgaaauuucaug

SEQ ID NO: 4385 - RNA, 38 nt, Artificial Sequence
  Description of Artificial Sequence:  Enzymatic Nucleic acid
uauuauuucugaugaggccguuaggccgaaauguguca

SEQ ID NO: 4386 - RNA, 38 nt, Artificial Sequence
  Description of Artificial Sequence:  Enzymatic Nucleic acid
cgaguuaucugaugaggccguuaggccgaaauuugaug

SEQ ID NO: 4387 - RNA, 38 nt, Artificial Sequence
  Description of Artificial Sequence:  Enzymatic Nucleic acid
auccgagucugaugaggccguuaggccgaaauuauuug

SEQ ID NO: 4388 - RNA, 38 nt, Artificial Sequence
  Description of Artificial Sequence:  Enzymatic Nucleic acid
uggaaucccugaugaggccguuaggccgaaaguuauua

SEQ ID NO: 4389 - RNA, 38 nt, Artificial Sequence
  Description of Artificial Sequence:  Enzymatic Nucleic acid
ugggcuggcugaugaggccguuaggccgaaauccgagu

SEQ ID NO: 4390 - RNA, 38 nt, Artificial Sequence
  Description of Artificial Sequence:  Enzymatic Nucleic acid
gugggcugcugaugaggccguuaggccgaaaauccgag

SEQ ID NO: 4391 - RNA, 38 nt, Artificial Sequence
  Description of Artificial Sequence:  Enzymatic Nucleic acid
augaaucccugaugaggccguuaggccgaaaugugggc

SEQ ID NO: 4392 - RNA, 38 nt, Artificial Sequence
  Description of Artificial Sequence:  Enzymatic Nucleic acid
ugcugaugcugaugaggccguuaggccgaaauccaaug

SEQ ID NO: 4393 - RNA, 38 nt, Artificial Sequence
  Description of Artificial Sequence:  Enzymatic Nucleic acid
augcugaucugaugaggccguuaggccgaaaauccaau

SEQ ID NO: 4394 - RNA, 38 nt, Artificial Sequence
  Description of Artificial Sequence:  Enzymatic Nucleic acid
caaaugcucugaugaggccguuaggccgaaaugaaucc

SEQ ID NO: 4395 - RNA, 38 nt, Artificial Sequence
  Description of Artificial Sequence:  Enzymatic Nucleic acid
uugguccacugaugaggccguuaggccgaaaugcugau

SEQ ID NO: 4396 - RNA, 38 nt, Artificial Sequence
  Description of Artificial Sequence:  Enzymatic Nucleic acid
auuggucccugaugaggccguuaggccgaaaaugcuga

SEQ ID NO: 4397 - RNA, 38 nt, Artificial Sequence
  Description of Artificial Sequence:  Enzymatic Nucleic acid
cugugggccugaugaggccguuaggccgaaauuggucc

SEQ ID NO: 4398 - RNA, 38 nt, Artificial Sequence
  Description of Artificial Sequence:  Enzymatic Nucleic acid
uccuuaggcugaugaggccguuaggccgaaauuccaca

SEQ ID NO: 4399 - RNA, 38 nt, Artificial Sequence
  Description of Artificial Sequence:  Enzymatic Nucleic acid
guuauccucugaugaggccguuaggccgaaagguauuc

SEQ ID NO: 4400 - RNA, 38 nt, Artificial Sequence
  Description of Artificial Sequence:  Enzymatic Nucleic acid
agcggugucugaugaggccguuaggccgaaauccuuag

SEQ ID NO: 4401 - RNA, 38 nt, Artificial Sequence
  Description of Artificial Sequence:  Enzymatic Nucleic acid
gagaacaacugaugaggccguuaggccgaaagcggugu

SEQ ID NO: 4402 - RNA, 38 nt, Artificial Sequence
  Description of Artificial Sequence:  Enzymatic Nucleic acid
cgagaacacugaugaggccguuaggccgaaaagcggug

SEQ ID NO: 4403 - RNA, 38 nt, Artificial Sequence
  Description of Artificial Sequence:  Enzymatic Nucleic acid
gcgagaaccugaugaggccguuaggccgaaaaagcggu

SEQ ID NO: 4404 - RNA, 38 nt, Artificial Sequence
  Description of Artificial Sequence:  Enzymatic Nucleic acid
uuugcgagcugaugaggccguuaggccgaaacaaaagc

SEQ ID NO: 4405 - RNA, 38 nt, Artificial Sequence
  Description of Artificial Sequence:  Enzymatic Nucleic acid
uuuugcgacugaugaggccguuaggccgaaaacaaaag

SEQ ID NO: 4406 - RNA, 38 nt, Artificial Sequence
  Description of Artificial Sequence:  Enzymatic Nucleic acid
guuuuugccugaugaggccguuaggccgaaagaacaaa

SEQ ID NO: 4407 - RNA, 38 nt, Artificial Sequence
  Description of Artificial Sequence:  Enzymatic Nucleic acid
uuaggagacugaugaggccguuaggccgaaacguuuuu

SEQ ID NO: 4408 - RNA, 38 nt, Artificial Sequence
  Description of Artificial Sequence:  Enzymatic Nucleic acid
aauuaggacugaugaggccguuaggccgaaauacguuu

SEQ ID NO: 4409 - RNA, 38 nt, Artificial Sequence
  Description of Artificial Sequence:  Enzymatic Nucleic acid
caaauuagcugaugaggccguuaggccgaaagauacgu

SEQ ID NO: 4410 - RNA, 38 nt, Artificial Sequence
  Description of Artificial Sequence:  Enzymatic Nucleic acid
ccucaaaucugaugaggccguuaggccgaaaggagaua

SEQ ID NO: 4411 - RNA, 38 nt, Artificial Sequence
  Description of Artificial Sequence:  Enzymatic Nucleic acid
gagccucacugaugaggccguuaggccgaaauuaggag

SEQ ID NO: 4412 - RNA, 38 nt, Artificial Sequence
  Description of Artificial Sequence:  Enzymatic Nucleic acid
ugagccuccugaugaggccguuaggccgaaaauuagga

SEQ ID NO: 4413 - RNA, 38 nt, Artificial Sequence
  Description of Artificial Sequence:  Enzymatic Nucleic acid
uuucaucucugaugaggccguuaggccgaaagccucaa

SEQ ID NO: 4414 - RNA, 38 nt, Artificial Sequence
  Description of Artificial Sequence:  Enzymatic Nucleic acid
aaggaccucugaugaggccguuaggccgaaaugcauuu

SEQ ID NO: 4415 - RNA, 38 nt, Artificial Sequence
  Description of Artificial Sequence:  Enzymatic Nucleic acid
ccccaaagcugaugaggccguuaggccgaaaccugaug

SEQ ID NO: 4416 - RNA, 38 nt, Artificial Sequence
  Description of Artificial Sequence:  Enzymatic Nucleic acid
augccccacugaugaggccguuaggccgaaaggaccug

SEQ ID NO: 4417 - RNA, 38 nt, Artificial Sequence
  Description of Artificial Sequence:  Enzymatic Nucleic acid
uaugcccccugaugaggccguuaggccgaaaaggaccu

SEQ ID NO: 4418 - RNA, 38 nt, Artificial Sequence
  Description of Artificial Sequence:  Enzymatic Nucleic acid
uucugauccugaugaggccguuaggccgaaaugcccca

SEQ ID NO: 4419 - RNA, 38 nt, Artificial Sequence
  Description of Artificial Sequence:  Enzymatic Nucleic acid
agucuucucugaugaggccguuaggccgaaaucuaugc

SEQ ID NO: 4420 - RNA, 38 nt, Artificial Sequence
  Description of Artificial Sequence:  Enzymatic Nucleic acid
cauuuuugcugaugaggccguuaggccgaaagucuucu

SEQ ID NO: 4421 - RNA, 38 nt, Artificial Sequence
  Description of Artificial Sequence:  Enzymatic Nucleic acid
agauuucacugaugaggccguuaggccgaaagcagcuu

SEQ ID NO: 4422 - RNA, 38 nt, Artificial Sequence
  Description of Artificial Sequence:  Enzymatic Nucleic acid
cuaaaggacugaugaggccguuaggccgaaauuucaga

SEQ ID NO: 4423 - RNA, 38 nt, Artificial Sequence
  Description of Artificial Sequence:  Enzymatic Nucleic acid
ggcuaaagcugaugaggccguuaggccgaaagauuuca

SEQ ID NO: 4424 - RNA, 38 nt, Artificial Sequence
  Description of Artificial Sequence:  Enzymatic Nucleic acid
gauggcuacugaugaggccguuaggccgaaaggagauu

SEQ ID NO: 4425 - RNA, 38 nt, Artificial Sequence
  Description of Artificial Sequence:  Enzymatic Nucleic acid
ugauggcucugaugaggccguuaggccgaaaaggagau

SEQ ID NO: 4426 - RNA, 38 nt, Artificial Sequence
  Description of Artificial Sequence:  Enzymatic Nucleic acid
gugauggccugaugaggccguuaggccgaaaaaggaga

SEQ ID NO: 4427 - RNA, 38 nt, Artificial Sequence
  Description of Artificial Sequence:  Enzymatic Nucleic acid
guuggggucugaugaggccguuaggccgaaauggcuaa

SEQ ID NO: 4428 - RNA, 38 nt, Artificial Sequence
  Description of Artificial Sequence:  Enzymatic Nucleic acid
cacaaacucugaugaggccguuaggccgaaauuuuggg

SEQ ID NO: 4429 - RNA, 38 nt, Artificial Sequence
  Description of Artificial Sequence:  Enzymatic Nucleic acid
acacaaaccugaugaggccguuaggccgaaaauuuugg

SEQ ID NO: 4430 - RNA, 38 nt, Artificial Sequence
  Description of Artificial Sequence:  Enzymatic Nucleic acid
guaacacacugaugaggccguuaggccgaaacuaauuu

SEQ ID NO: 4431 - RNA, 38 nt, Artificial Sequence
  Description of Artificial Sequence:  Enzymatic Nucleic acid
aguaacaccugaugaggccguuaggccgaaaacuaauu

SEQ ID NO: 4432 - RNA, 38 nt, Artificial Sequence
  Description of Artificial Sequence:  Enzymatic Nucleic acid
ccauaagucugaugaggccguuaggccgaaacacaaac

SEQ ID NO: 4433 - RNA, 38 nt, Artificial Sequence
  Description of Artificial Sequence:  Enzymatic Nucleic acid
uccauaagcugaugaggccguuaggccgaaaacacaaa

SEQ ID NO: 4434 - RNA, 38 nt, Artificial Sequence
  Description of Artificial Sequence:  Enzymatic Nucleic acid
ucuuccaucugaugaggccguuaggccgaaaguaacac

SEQ ID NO: 4435 - RNA, 38 nt, Artificial Sequence
  Description of Artificial Sequence:  Enzymatic Nucleic acid
aucuuccacugaugaggccguuaggccgaaaaguaaca

SEQ ID NO: 4436 - RNA, 38 nt, Artificial Sequence
  Description of Artificial Sequence:  Enzymatic Nucleic acid
gagaaaaccugaugaggccguuaggccgaaaucuucca

SEQ ID NO: 4437 - RNA, 38 nt, Artificial Sequence
  Description of Artificial Sequence:  Enzymatic Nucleic acid
aaggagaacugaugaggccguuaggccgaaacuaucuu

SEQ ID NO: 4438 - RNA, 38 nt, Artificial Sequence
  Description of Artificial Sequence:  Enzymatic Nucleic acid
aaaggagacugaugaggccguuaggccgaaaacuaucu

SEQ ID NO: 4439 - RNA, 38 nt, Artificial Sequence
  Description of Artificial Sequence:  Enzymatic Nucleic acid
aaaaggagcugaugaggccguuaggccgaaaaacuauc

SEQ ID NO: 4440 - RNA, 38 nt, Artificial Sequence
  Description of Artificial Sequence:  Enzymatic Nucleic acid
uaaaaggacugaugaggccguuaggccgaaaaaacuau

SEQ ID NO: 4441 - RNA, 38 nt, Artificial Sequence
  Description of Artificial Sequence:  Enzymatic Nucleic acid
aguaaaagcugaugaggccguuaggccgaaagaaaacu

SEQ ID NO: 4442 - RNA, 38 nt, Artificial Sequence
  Description of Artificial Sequence:  Enzymatic Nucleic acid
ugaaguaacugaugaggccguuaggccgaaaggagaaa

SEQ ID NO: 4443 - RNA, 38 nt, Artificial Sequence
  Description of Artificial Sequence:  Enzymatic Nucleic acid
gugaaguacugaugaggccguuaggccgaaaaggagaa

SEQ ID NO: 4444 - RNA, 38 nt, Artificial Sequence
  Description of Artificial Sequence:  Enzymatic Nucleic acid
agugaagucugaugaggccguuaggccgaaaaaggaga

SEQ ID NO: 4445 - RNA, 38 nt, Artificial Sequence
  Description of Artificial Sequence:  Enzymatic Nucleic acid
aagugaagcugaugaggccguuaggccgaaaaaaggag

SEQ ID NO: 4446 - RNA, 38 nt, Artificial Sequence
  Description of Artificial Sequence:  Enzymatic Nucleic acid
uugaagugcugaugaggccguuaggccgaaaguaaaag

SEQ ID NO: 4447 - RNA, 38 nt, Artificial Sequence
  Description of Artificial Sequence:  Enzymatic Nucleic acid
uuugaagucugaugaggccguuaggccgaaaaguaaaa

SEQ ID NO: 4448 - RNA, 38 nt, Artificial Sequence
  Description of Artificial Sequence:  Enzymatic Nucleic acid
agcuuuugcugaugaggccguuaggccgaaagugaagu

SEQ ID NO: 4449 - RNA, 38 nt, Artificial Sequence
  Description of Artificial Sequence:  Enzymatic Nucleic acid
aagcuuuucugaugaggccguuaggccgaaaagugaag

SEQ ID NO: 4450 - RNA, 38 nt, Artificial Sequence
  Description of Artificial Sequence:  Enzymatic Nucleic acid
ugaguaaacugaugaggccguuaggccgaaagcuuuug

SEQ ID NO: 4451 - RNA, 38 nt, Artificial Sequence
  Description of Artificial Sequence:  Enzymatic Nucleic acid
uugaguaacugaugaggccguuaggccgaaaagcuuuu

SEQ ID NO: 4452 - RNA, 38 nt, Artificial Sequence
  Description of Artificial Sequence:  Enzymatic Nucleic acid
uuugaguacugaugaggccguuaggccgaaaaagcuuu

SEQ ID NO: 4453 - RNA, 38 nt, Artificial Sequence
  Description of Artificial Sequence:  Enzymatic Nucleic acid
cuuugagucugaugaggccguuaggccgaaaaaagcuu

SEQ ID NO: 4454 - RNA, 38 nt, Artificial Sequence
  Description of Artificial Sequence:  Enzymatic Nucleic acid
ucuuugagcugaugaggccguuaggccgaaaaaaagcu

SEQ ID NO: 4455 - RNA, 38 nt, Artificial Sequence
  Description of Artificial Sequence:  Enzymatic Nucleic acid
uacucuuucugaugaggccguuaggccgaaaguaaaaa

SEQ ID NO: 4456 - RNA, 38 nt, Artificial Sequence
  Description of Artificial Sequence:  Enzymatic Nucleic acid
ggaacauacugaugaggccguuaggccgaaacucuuug

SEQ ID NO: 4457 - RNA, 38 nt, Artificial Sequence
  Description of Artificial Sequence:  Enzymatic Nucleic acid
agggaacacugaugaggccguuaggccgaaauacucuu

SEQ ID NO: 4458 - RNA, 38 nt, Artificial Sequence
  Description of Artificial Sequence:  Enzymatic Nucleic acid
cuggagggcugaugaggccguuaggccgaaacauauac

SEQ ID NO: 4459 - RNA, 38 nt, Artificial Sequence
  Description of Artificial Sequence:  Enzymatic Nucleic acid
ccuggaggcugaugaggccguuaggccgaaaacauaua

SEQ ID NO: 4460 - RNA, 38 nt, Artificial Sequence
  Description of Artificial Sequence:  Enzymatic Nucleic acid
cugaccugcugaugaggccguuaggccgaaagggaaca

SEQ ID NO: 4461 - RNA, 38 nt, Artificial Sequence
  Description of Artificial Sequence:  Enzymatic Nucleic acid
gggcagcucugaugaggccguuaggccgaaaccuggag

SEQ ID NO: 4462 - RNA, 38 nt, Artificial Sequence
  Description of Artificial Sequence:  Enzymatic Nucleic acid
agcguaagcugaugaggccguuaggccgaaaggggguu

SEQ ID NO: 4463 - RNA, 38 nt, Artificial Sequence
  Description of Artificial Sequence:  Enzymatic Nucleic acid
caaagcgucugaugaggccguuaggccgaaaggagggg

SEQ ID NO: 4464 - RNA, 38 nt, Artificial Sequence
  Description of Artificial Sequence:  Enzymatic Nucleic acid
acaaagcgcugaugaggccguuaggccgaaaaggaggg

SEQ ID NO: 4465 - RNA, 38 nt, Artificial Sequence
  Description of Artificial Sequence:  Enzymatic Nucleic acid
gugugacacugaugaggccguuaggccgaaagcguaag

SEQ ID NO: 4466 - RNA, 38 nt, Artificial Sequence
  Description of Artificial Sequence:  Enzymatic Nucleic acid
ugugugaccugaugaggccguuaggccgaaaagcguaa

SEQ ID NO: 4467 - RNA, 38 nt, Artificial Sequence
  Description of Artificial Sequence:  Enzymatic Nucleic acid
uuuugugucugaugaggccguuaggccgaaacaaagcg

SEQ ID NO: 4468 - RNA, 38 nt, Artificial Sequence
  Description of Artificial Sequence:  Enzymatic Nucleic acid
aaggcagacugaugaggccguuaggccgaaacacuuuu

SEQ ID NO: 4469 - RNA, 38 nt, Artificial Sequence
  Description of Artificial Sequence:  Enzymatic Nucleic acid
ucaaggcacugaugaggccguuaggccgaaagacacuu

SEQ ID NO: 4470 - RNA, 38 nt, Artificial Sequence
  Description of Artificial Sequence:  Enzymatic Nucleic acid
gaugacuccugaugaggccguuaggccgaaaggcagag

SEQ ID NO: 4471 - RNA, 38 nt, Artificial Sequence
  Description of Artificial Sequence:  Enzymatic Nucleic acid
gaauagaucugaugaggccguuaggccgaaacucaagg

SEQ ID NO: 4472 - RNA, 38 nt, Artificial Sequence
  Description of Artificial Sequence:  Enzymatic Nucleic acid
cuugaauacugaugaggccguuaggccgaaaugacuca

SEQ ID NO: 4473 - RNA, 38 nt, Artificial Sequence
  Description of Artificial Sequence:  Enzymatic Nucleic acid
ugcuugaacugaugaggccguuaggccgaaagaugacu

SEQ ID NO: 4474 - RNA, 38 nt, Artificial Sequence
  Description of Artificial Sequence:  Enzymatic Nucleic acid
agugcuugcugaugaggccguuaggccgaaauagauga

SEQ ID NO: 4475 - RNA, 38 nt, Artificial Sequence
  Description of Artificial Sequence:  Enzymatic Nucleic acid
aagugcuucugaugaggccguuaggccgaaaauagaug

SEQ ID NO: 4476 - RNA, 38 nt, Artificial Sequence
  Description of Artificial Sequence:  Enzymatic Nucleic acid
agagcugucugaugaggccguuaggccgaaagugcuug

SEQ ID NO: 4477 - RNA, 38 nt, Artificial Sequence
  Description of Artificial Sequence:  Enzymatic Nucleic acid
cagagcugcugaugaggccguuaggccgaaaagugcuu

SEQ ID NO: 4478 - RNA, 38 nt, Artificial Sequence
  Description of Artificial Sequence:  Enzymatic Nucleic acid
uguggccacugaugaggccguuaggccgaaagcuguaa

SEQ ID NO: 4479 - RNA, 38 nt, Artificial Sequence
  Description of Artificial Sequence:  Enzymatic Nucleic acid
accuguaacugaugaggccguuaggccgaaaugcccug

SEQ ID NO: 4480 - RNA, 38 nt, Artificial Sequence
  Description of Artificial Sequence:  Enzymatic Nucleic acid
caccuguacugaugaggccguuaggccgaaaaugcccu

SEQ ID NO: 4481 - RNA, 38 nt, Artificial Sequence
  Description of Artificial Sequence:  Enzymatic Nucleic acid
gcaccugucugaugaggccguuaggccgaaaaaugccc

SEQ ID NO: 4482 - RNA, 38 nt, Artificial Sequence
  Description of Artificial Sequence:  Enzymatic Nucleic acid
cgcaccugcugaugaggccguuaggccgaaaaaaugcc

SEQ ID NO: 4483 - RNA, 38 nt, Artificial Sequence
  Description of Artificial Sequence:  Enzymatic Nucleic acid
cauaaugccugaugaggccguuaggccgaaacugucau

SEQ ID NO: 4484 - RNA, 38 nt, Artificial Sequence
  Description of Artificial Sequence:  Enzymatic Nucleic acid
cuacucaucugaugaggccguuaggccgaaaugcuacu

SEQ ID NO: 4485 - RNA, 38 nt, Artificial Sequence
  Description of Artificial Sequence:  Enzymatic Nucleic acid
acuacucacugaugaggccguuaggccgaaaaugcuac

SEQ ID NO: 4486 - RNA, 38 nt, Artificial Sequence
  Description of Artificial Sequence:  Enzymatic Nucleic acid
auucacaccugaugaggccguuaggccgaaacucauaa

SEQ ID NO: 4487 - RNA, 38 nt, Artificial Sequence
  Description of Artificial Sequence:  Enzymatic Nucleic acid
acuaccugcugaugaggccguuaggccgaaauucacac

SEQ ID NO: 4488 - RNA, 38 nt, Artificial Sequence
  Description of Artificial Sequence:  Enzymatic Nucleic acid
uacuaccucugaugaggccguuaggccgaaaauucaca

SEQ ID NO: 4489 - RNA, 38 nt, Artificial Sequence
  Description of Artificial Sequence:  Enzymatic Nucleic acid
auauuuaccugaugaggccguuaggccgaaaccugaau

SEQ ID NO: 4490 - RNA, 38 nt, Artificial Sequence
  Description of Artificial Sequence:  Enzymatic Nucleic acid
uucauauucugaugaggccguuaggccgaaacuaccug

SEQ ID NO: 4491 - RNA, 38 nt, Artificial Sequence
  Description of Artificial Sequence:  Enzymatic Nucleic acid
uaguuucacugaugaggccguuaggccgaaauuuacua

SEQ ID NO: 4492 - RNA, 38 nt, Artificial Sequence
  Description of Artificial Sequence:  Enzymatic Nucleic acid
ucaaaccccugaugaggccguuaggccgaaaguuucau

SEQ ID NO: 4493 - RNA, 38 nt, Artificial Sequence
  Description of Artificial Sequence:  Enzymatic Nucleic acid
caauuucacugaugaggccguuaggccgaaacccuagu

SEQ ID NO: 4494 - RNA, 38 nt, Artificial Sequence
  Description of Artificial Sequence:  Enzymatic Nucleic acid
ucaauuuccugaugaggccguuaggccgaaaacccuag

SEQ ID NO: 4495 - RNA, 38 nt, Artificial Sequence
  Description of Artificial Sequence:  Enzymatic Nucleic acid
gcauuauccugaugaggccguuaggccgaaauuucaaa

SEQ ID NO: 4496 - RNA, 38 nt, Artificial Sequence
  Description of Artificial Sequence:  Enzymatic Nucleic acid
gaaagcaucugaugaggccguuaggccgaaaucaauuu

SEQ ID NO: 4497 - RNA, 38 nt, Artificial Sequence
  Description of Artificial Sequence:  Enzymatic Nucleic acid
uguugugacugaugaggccguuaggccgaaagcauuau

SEQ ID NO: 4498 - RNA, 38 nt, Artificial Sequence
  Description of Artificial Sequence:  Enzymatic Nucleic acid
auguugugcugaugaggccguuaggccgaaaagcauua

SEQ ID NO: 4499 - RNA, 38 nt, Artificial Sequence
  Description of Artificial Sequence:  Enzymatic Nucleic acid
aauguugucugaugaggccguuaggccgaaaaagcauu

SEQ ID NO: 4500 - RNA, 38 nt, Artificial Sequence
  Description of Artificial Sequence:  Enzymatic Nucleic acid
caucugcacugaugaggccguuaggccgaaauguugug

SEQ ID NO: 4501 - RNA, 38 nt, Artificial Sequence
  Description of Artificial Sequence:  Enzymatic Nucleic acid
acaucugccugaugaggccguuaggccgaaaauguugu

SEQ ID NO: 4502 - RNA, 38 nt, Artificial Sequence
  Description of Artificial Sequence:  Enzymatic Nucleic acid
ccuucuaacugaugaggccguuaggccgaaacaucugc

SEQ ID NO: 4503 - RNA, 38 nt, Artificial Sequence
  Description of Artificial Sequence:  Enzymatic Nucleic acid
uccuucuacugaugaggccguuaggccgaaaacaucug

SEQ ID NO: 4504 - RNA, 38 nt, Artificial Sequence
  Description of Artificial Sequence:  Enzymatic Nucleic acid
uuccuucucugaugaggccguuaggccgaaaaacaucu

SEQ ID NO: 4505 - RNA, 38 nt, Artificial Sequence
  Description of Artificial Sequence:  Enzymatic Nucleic acid
uuuccuuccugaugaggccguuaggccgaaaaaacauc

SEQ ID NO: 4506 - RNA, 38 nt, Artificial Sequence
  Description of Artificial Sequence:  Enzymatic Nucleic acid
uaggaaggcugaugaggccguuaggccgaaacuuuuuu

SEQ ID NO: 4507 - RNA, 38 nt, Artificial Sequence
  Description of Artificial Sequence:  Enzymatic Nucleic acid
uuaggaagcugaugaggccguuaggccgaaaacuuuuu

SEQ ID NO: 4508 - RNA, 38 nt, Artificial Sequence
  Description of Artificial Sequence:  Enzymatic Nucleic acid
auuuuaggcugaugaggccguuaggccgaaaggaacuu

SEQ ID NO: 4509 - RNA, 38 nt, Artificial Sequence
  Description of Artificial Sequence:  Enzymatic Nucleic acid
uauuuuagcugaugaggccguuaggccgaaaaggaacu

SEQ ID NO: 4510 - RNA, 38 nt, Artificial Sequence
  Description of Artificial Sequence:  Enzymatic Nucleic acid
aauuauuucugaugaggccguuaggccgaaaggaagga

SEQ ID NO: 4511 - RNA, 38 nt, Artificial Sequence
  Description of Artificial Sequence:  Enzymatic Nucleic acid
agagaaaucugaugaggccguuaggccgaaauuuuagg

SEQ ID NO: 4512 - RNA, 38 nt, Artificial Sequence
  Description of Artificial Sequence:  Enzymatic Nucleic acid
uguagagacugaugaggccguuaggccgaaauuauuuu

SEQ ID NO: 4513 - RNA, 38 nt, Artificial Sequence
  Description of Artificial Sequence:  Enzymatic Nucleic acid
uuguagagcugaugaggccguuaggccgaaaauuauuu

SEQ ID NO: 4514 - RNA, 38 nt, Artificial Sequence
  Description of Artificial Sequence:  Enzymatic Nucleic acid
auuguagacugaugaggccguuaggccgaaaaauuauu

SEQ ID NO: 4515 - RNA, 38 nt, Artificial Sequence
  Description of Artificial Sequence:  Enzymatic Nucleic acid
caauuguacugaugaggccguuaggccgaaagaaauua

SEQ ID NO: 4516 - RNA, 38 nt, Artificial Sequence
  Description of Artificial Sequence:  Enzymatic Nucleic acid
uccaauugcugaugaggccguuaggccgaaagagaaau

SEQ ID NO: 4517 - RNA, 38 nt, Artificial Sequence
  Description of Artificial Sequence:  Enzymatic Nucleic acid
aaucuucccugaugaggccguuaggccgaaauuguaga

SEQ ID NO: 4518 - RNA, 38 nt, Artificial Sequence
  Description of Artificial Sequence:  Enzymatic Nucleic acid
aaucuucccugaugaggccguuaggccgaaaucuucca

SEQ ID NO: 4519 - RNA, 38 nt, Artificial Sequence
  Description of Artificial Sequence:  Enzymatic Nucleic acid
acuagcugcugaugaggccguuaggccgaaaucuucca

SEQ ID NO: 4520 - RNA, 38 nt, Artificial Sequence
  Description of Artificial Sequence:  Enzymatic Nucleic acid
aacuagcucugaugaggccguuaggccgaaaaucuucc

SEQ ID NO: 4521 - RNA, 38 nt, Artificial Sequence
  Description of Artificial Sequence:  Enzymatic Nucleic acid
cuccuaaccugaugaggccguuaggccgaaagcugaau

SEQ ID NO: 4522 - RNA, 38 nt, Artificial Sequence
  Description of Artificial Sequence:  Enzymatic Nucleic acid
gggcuccucugaugaggccguuaggccgaaacuagcug

SEQ ID NO: 4523 - RNA, 38 nt, Artificial Sequence
  Description of Artificial Sequence:  Enzymatic Nucleic acid
ugggcucccugaugaggccguuaggccgaaaacuagcu

SEQ ID NO: 4524 - RNA, 38 nt, Artificial Sequence
  Description of Artificial Sequence:  Enzymatic Nucleic acid
uaggaaaacugaugaggccguuaggccgaaaugggcuc

SEQ ID NO: 4525 - RNA, 38 nt, Artificial Sequence
  Description of Artificial Sequence:  Enzymatic Nucleic acid
uuaggaaacugaugaggccguuaggccgaaaaugggcu

SEQ ID NO: 4526 - RNA, 38 nt, Artificial Sequence
  Description of Artificial Sequence:  Enzymatic Nucleic acid
auuaggaacugaugaggccguuaggccgaaaaaugggc

SEQ ID NO: 4527 - RNA, 38 nt, Artificial Sequence
  Description of Artificial Sequence:  Enzymatic Nucleic acid
gauuaggacugaugaggccguuaggccgaaaaaauggg

SEQ ID NO: 4528 - RNA, 38 nt, Artificial Sequence
  Description of Artificial Sequence:  Enzymatic Nucleic acid
agauuaggcugaugaggccguuaggccgaaaaaaaugg

SEQ ID NO: 4529 - RNA, 38 nt, Artificial Sequence
  Description of Artificial Sequence:  Enzymatic Nucleic acid
cagauuagcugaugaggccguuaggccgaaaaaaaaug

SEQ ID NO: 4530 - RNA, 38 nt, Artificial Sequence
  Description of Artificial Sequence:  Enzymatic Nucleic acid
acacagaucugaugaggccguuaggccgaaaggaaaaa

SEQ ID NO: 4531 - RNA, 38 nt, Artificial Sequence
  Description of Artificial Sequence:  Enzymatic Nucleic acid
cacacacacugaugaggccguuaggccgaaauuaggaa

SEQ ID NO: 4532 - RNA, 38 nt, Artificial Sequence
  Description of Artificial Sequence:  Enzymatic Nucleic acid
agucaggucugaugaggccguuaggccgaaacagggca

SEQ ID NO: 4533 - RNA, 38 nt, Artificial Sequence
  Description of Artificial Sequence:  Enzymatic Nucleic acid
cugcuguucugaugaggccguuaggccgaaaccaguca

SEQ ID NO: 4534 - RNA, 38 nt, Artificial Sequence
  Description of Artificial Sequence:  Enzymatic Nucleic acid
acugcugucugaugaggccguuaggccgaaaaccaguc

SEQ ID NO: 4535 - RNA, 38 nt, Artificial Sequence
  Description of Artificial Sequence:  Enzymatic Nucleic acid
uuacaaagcugaugaggccguuaggccgaaacugcugu

SEQ ID NO: 4536 - RNA, 38 nt, Artificial Sequence
  Description of Artificial Sequence:  Enzymatic Nucleic acid
uguuuacacugaugaggccguuaggccgaaaggacugc

SEQ ID NO: 4537 - RNA, 38 nt, Artificial Sequence
  Description of Artificial Sequence:  Enzymatic Nucleic acid
cuguuuaccugaugaggccguuaggccgaaaaggacug

SEQ ID NO: 4538 - RNA, 38 nt, Artificial Sequence
  Description of Artificial Sequence:  Enzymatic Nucleic acid
acacuguucugaugaggccguuaggccgaaacaaagga

SEQ ID NO: 4539 - RNA, 38 nt, Artificial Sequence
  Description of Artificial Sequence:  Enzymatic Nucleic acid
gaguuuaacugaugaggccguuaggccgaaacacuguu

SEQ ID NO: 4540 - RNA, 38 nt, Artificial Sequence
  Description of Artificial Sequence:  Enzymatic Nucleic acid
agaguuuacugaugaggccguuaggccgaaaacacugu

SEQ ID NO: 4541 - RNA, 38 nt, Artificial Sequence
  Description of Artificial Sequence:  Enzymatic Nucleic acid
gagaguuucugaugaggccguuaggccgaaaaacacug

SEQ ID NO: 4542 - RNA, 38 nt, Artificial Sequence
  Description of Artificial Sequence:  Enzymatic Nucleic acid
ggagaguucugaugaggccguuaggccgaaaaaacacu

SEQ ID NO: 4543 - RNA, 38 nt, Artificial Sequence
  Description of Artificial Sequence:  Enzymatic Nucleic acid
gacuaggacugaugaggccguuaggccgaaaguuuaaa

SEQ ID NO: 4544 - RNA, 38 nt, Artificial Sequence
  Description of Artificial Sequence:  Enzymatic Nucleic acid
uugacuagcugaugaggccguuaggccgaaagaguuua

SEQ ID NO: 4545 - RNA, 38 nt, Artificial Sequence
  Description of Artificial Sequence:  Enzymatic Nucleic acid
auauugaccugaugaggccguuaggccgaaaggagagu

SEQ ID NO: 4546 - RNA, 38 nt, Artificial Sequence
  Description of Artificial Sequence:  Enzymatic Nucleic acid
uggauauucugaugaggccguuaggccgaaacuaggag

SEQ ID NO: 4547 - RNA, 38 nt, Artificial Sequence
  Description of Artificial Sequence:  Enzymatic Nucleic acid
gggguggacugaugaggccguuaggccgaaauugacua

SEQ ID NO: 4548 - RNA, 38 nt, Artificial Sequence
  Description of Artificial Sequence:  Enzymatic Nucleic acid
auggggugcugaugaggccguuaggccgaaauauugac

SEQ ID NO: 4549 - RNA, 38 nt, Artificial Sequence
  Description of Artificial Sequence:  Enzymatic Nucleic acid
auaaauugcugaugaggccguuaggccgaaauggggug

SEQ ID NO: 4550 - RNA, 38 nt, Artificial Sequence
  Description of Artificial Sequence:  Enzymatic Nucleic acid
ccuugauacugaugaggccguuaggccgaaauuggaug

SEQ ID NO: 4551 - RNA, 38 nt, Artificial Sequence
  Description of Artificial Sequence:  Enzymatic Nucleic acid
uccuugaucugaugaggccguuaggccgaaaauuggau

SEQ ID NO: 4552 - RNA, 38 nt, Artificial Sequence
  Description of Artificial Sequence:  Enzymatic Nucleic acid
uuccuugacugaugaggccguuaggccgaaaaauugga

SEQ ID NO: 4553 - RNA, 38 nt, Artificial Sequence
  Description of Artificial Sequence:  Enzymatic Nucleic acid
ucuuccuucugaugaggccguuaggccgaaauaaauug

SEQ ID NO: 4554 - RNA, 38 nt, Artificial Sequence
  Description of Artificial Sequence:  Enzymatic Nucleic acid
auuuucugcugaugaggccguuaggccgaaaccauuuc

SEQ ID NO: 4555 - RNA, 38 nt, Artificial Sequence
  Description of Artificial Sequence:  Enzymatic Nucleic acid
uauuuucucugaugaggccguuaggccgaaaaccauuu

SEQ ID NO: 4556 - RNA, 38 nt, Artificial Sequence
  Description of Artificial Sequence:  Enzymatic Nucleic acid
gcugaaaacugaugaggccguuaggccgaaauuuucug

SEQ ID NO: 4557 - RNA, 38 nt, Artificial Sequence
  Description of Artificial Sequence:  Enzymatic Nucleic acid
aggcugaacugaugaggccguuaggccgaaauauuuuc

SEQ ID NO: 4558 - RNA, 38 nt, Artificial Sequence
  Description of Artificial Sequence:  Enzymatic Nucleic acid
uaggcugacugaugaggccguuaggccgaaaauauuuu

SEQ ID NO: 4559 - RNA, 38 nt, Artificial Sequence
  Description of Artificial Sequence:  Enzymatic Nucleic acid
guaggcugcugaugaggccguuaggccgaaaaauauuu

SEQ ID NO: 4560 - RNA, 38 nt, Artificial Sequence
  Description of Artificial Sequence:  Enzymatic Nucleic acid
uguaggcucugaugaggccguuaggccgaaaaaauauu

SEQ ID NO: 4561 - RNA, 38 nt, Artificial Sequence
  Description of Artificial Sequence:  Enzymatic Nucleic acid
cauaacugcugaugaggccguuaggccgaaaggcugaa

SEQ ID NO: 4562 - RNA, 38 nt, Artificial Sequence
  Description of Artificial Sequence:  Enzymatic Nucleic acid
cugaacaucugaugaggccguuaggccgaaacuguagg

SEQ ID NO: 4563 - RNA, 38 nt, Artificial Sequence
  Description of Artificial Sequence:  Enzymatic Nucleic acid
acugaacacugaugaggccguuaggccgaaaacuguag

SEQ ID NO: 4564 - RNA, 38 nt, Artificial Sequence
  Description of Artificial Sequence:  Enzymatic Nucleic acid
ugugacugcugaugaggccguuaggccgaaacauaacu

SEQ ID NO: 4565 - RNA, 38 nt, Artificial Sequence
  Description of Artificial Sequence:  Enzymatic Nucleic acid
gugugacucugaugaggccguuaggccgaaaacauaac

SEQ ID NO: 4566 - RNA, 38 nt, Artificial Sequence
  Description of Artificial Sequence:  Enzymatic Nucleic acid
gugugugucugaugaggccguuaggccgaaacugaaca

SEQ ID NO: 4567 - RNA, 38 nt, Artificial Sequence
  Description of Artificial Sequence:  Enzymatic Nucleic acid
acauuuugcugaugaggccguuaggccgaaaugugugu

SEQ ID NO: 4568 - RNA, 38 nt, Artificial Sequence
  Description of Artificial Sequence:  Enzymatic Nucleic acid
gcaaaaggcugaugaggccguuaggccgaaacauuuug

SEQ ID NO: 4569 - RNA, 38 nt, Artificial Sequence
  Description of Artificial Sequence:  Enzymatic Nucleic acid
agcaaaagcugaugaggccguuaggccgaaaacauuuu

SEQ ID NO: 4570 - RNA, 38 nt, Artificial Sequence
  Description of Artificial Sequence:  Enzymatic Nucleic acid
aaaagcaacugaugaggccguuaggccgaaaggaacau

SEQ ID NO: 4571 - RNA, 38 nt, Artificial Sequence
  Description of Artificial Sequence:  Enzymatic Nucleic acid
uaaaagcacugaugaggccguuaggccgaaaaggaaca

SEQ ID NO: 4572 - RNA, 38 nt, Artificial Sequence
  Description of Artificial Sequence:  Enzymatic Nucleic acid
uuaaaagccugaugaggccguuaggccgaaaaaggaac

SEQ ID NO: 4573 - RNA, 38 nt, Artificial Sequence
  Description of Artificial Sequence:  Enzymatic Nucleic acid
uacuuuaacugaugaggccguuaggccgaaagcaaaag

SEQ ID NO: 4574 - RNA, 38 nt, Artificial Sequence
  Description of Artificial Sequence:  Enzymatic Nucleic acid
uuacuuuacugaugaggccguuaggccgaaaagcaaaa

SEQ ID NO: 4575 - RNA, 38 nt, Artificial Sequence
  Description of Artificial Sequence:  Enzymatic Nucleic acid
auuacuuucugaugaggccguuaggccgaaaaagcaaa

SEQ ID NO: 4576 - RNA, 38 nt, Artificial Sequence
  Description of Artificial Sequence:  Enzymatic Nucleic acid
aauuacuucugaugaggccguuaggccgaaaaaagcaa

SEQ ID NO: 4577 - RNA, 38 nt, Artificial Sequence
  Description of Artificial Sequence:  Enzymatic Nucleic acid
ucaaaaaucugaugaggccguuaggccgaaacuuuaaa

SEQ ID NO: 4578 - RNA, 38 nt, Artificial Sequence
  Description of Artificial Sequence:  Enzymatic Nucleic acid
gagucaaacugaugaggccguuaggccgaaauuacuuu

SEQ ID NO: 4579 - RNA, 38 nt, Artificial Sequence
  Description of Artificial Sequence:  Enzymatic Nucleic acid
ggagucaacugaugaggccguuaggccgaaaauuacuu

SEQ ID NO: 4580 - RNA, 38 nt, Artificial Sequence
  Description of Artificial Sequence:  Enzymatic Nucleic acid
gggagucacugaugaggccguuaggccgaaaaauuacu

SEQ ID NO: 4581 - RNA, 38 nt, Artificial Sequence
  Description of Artificial Sequence:  Enzymatic Nucleic acid
ugggaguccugaugaggccguuaggccgaaaaaauuac

SEQ ID NO: 4582 - RNA, 38 nt, Artificial Sequence
  Description of Artificial Sequence:  Enzymatic Nucleic acid
ugaucuggcugaugaggccguuaggccgaaagucaaaa

SEQ ID NO: 4583 - RNA, 38 nt, Artificial Sequence
  Description of Artificial Sequence:  Enzymatic Nucleic acid
cucugacucugaugaggccguuaggccgaaaucuggga

SEQ ID NO: 4584 - RNA, 38 nt, Artificial Sequence
  Description of Artificial Sequence:  Enzymatic Nucleic acid
ggggcucucugaugaggccguuaggccgaaacugaucu

SEQ ID NO: 4585 - RNA, 38 nt, Artificial Sequence
  Description of Artificial Sequence:  Enzymatic Nucleic acid
caaugcugcugaugaggccguuaggccgaaaggggcuc

SEQ ID NO: 4586 - RNA, 38 nt, Artificial Sequence
  Description of Artificial Sequence:  Enzymatic Nucleic acid
uucuuaaccugaugaggccguuaggccgaaaugcugua

SEQ ID NO: 4587 - RNA, 38 nt, Artificial Sequence
  Description of Artificial Sequence:  Enzymatic Nucleic acid
acuuucuucugaugaggccguuaggccgaaacaaugcu

SEQ ID NO: 4588 - RNA, 38 nt, Artificial Sequence
  Description of Artificial Sequence:  Enzymatic Nucleic acid
uacuuucucugaugaggccguuaggccgaaaacaaugc

SEQ ID NO: 4589 - RNA, 38 nt, Artificial Sequence
  Description of Artificial Sequence:  Enzymatic Nucleic acid
aaaucaaacugaugaggccguuaggccgaaacuuucuu

SEQ ID NO: 4590 - RNA, 38 nt, Artificial Sequence
  Description of Artificial Sequence:  Enzymatic Nucleic acid
aaaaaucacugaugaggccguuaggccgaaauacuuuc

SEQ ID NO: 4591 - RNA, 38 nt, Artificial Sequence
  Description of Artificial Sequence:  Enzymatic Nucleic acid
caaaaauccugaugaggccguuaggccgaaaauacuuu

SEQ ID NO: 4592 - RNA, 38 nt, Artificial Sequence
  Description of Artificial Sequence:  Enzymatic Nucleic acid
gagacaaacugaugaggccguuaggccgaaaucaaaua

SEQ ID NO: 4593 - RNA, 38 nt, Artificial Sequence
  Description of Artificial Sequence:  Enzymatic Nucleic acid
ugagacaacugaugaggccguuaggccgaaaaucaaau

SEQ ID NO: 4594 - RNA, 38 nt, Artificial Sequence
  Description of Artificial Sequence:  Enzymatic Nucleic acid
uugagacacugaugaggccguuaggccgaaaaaucaaa

SEQ ID NO: 4595 - RNA, 38 nt, Artificial Sequence
  Description of Artificial Sequence:  Enzymatic Nucleic acid
auugagaccugaugaggccguuaggccgaaaaaaucaa

SEQ ID NO: 4596 - RNA, 38 nt, Artificial Sequence
  Description of Artificial Sequence:  Enzymatic Nucleic acid
uucauugacugaugaggccguuaggccgaaacaaaaau

SEQ ID NO: 4597 - RNA, 38 nt, Artificial Sequence
  Description of Artificial Sequence:  Enzymatic Nucleic acid
uuuucauucugaugaggccguuaggccgaaagacaaaa

SEQ ID NO: 4598 - RNA, 38 nt, Artificial Sequence
  Description of Artificial Sequence:  Enzymatic Nucleic acid
uauaguuucugaugaggccguuaggccgaaauuuucau

SEQ ID NO: 4599 - RNA, 38 nt, Artificial Sequence
  Description of Artificial Sequence:  Enzymatic Nucleic acid
aaugaauacugaugaggccguuaggccgaaaguuuuau

SEQ ID NO: 4600 - RNA, 38 nt, Artificial Sequence
  Description of Artificial Sequence:  Enzymatic Nucleic acid
gaaaugaacugaugaggccguuaggccgaaauaguuuu

SEQ ID NO: 4601 - RNA, 38 nt, Artificial Sequence
  Description of Artificial Sequence:  Enzymatic Nucleic acid
  misc_feature (31)..(31): n stands for inosine
gggacucccugaugaggccguuaggccgaancgcagcg

SEQ ID NO: 4602 - RNA, 38 nt, Artificial Sequence
  Description of Artificial Sequence:  Enzymatic Nucleic acid
  misc_feature (31)..(31): n stands for inosine
cuagcucgcugaugaggccguuaggccgaanacuccgg

SEQ ID NO: 4603 - RNA, 38 nt, Artificial Sequence
  Description of Artificial Sequence:  Enzymatic Nucleic acid
  misc_feature (31)..(31): n stands for inosine
gcuagcuccugaugaggccguuaggccgaangacuccg

SEQ ID NO: 4604 - RNA, 38 nt, Artificial Sequence
  Description of Artificial Sequence:  Enzymatic Nucleic acid
  misc_feature (31)..(31): n stands for inosine
ccggggcucugaugaggccguuaggccgaancucggga

SEQ ID NO: 4605 - RNA, 38 nt, Artificial Sequence
  Description of Artificial Sequence:  Enzymatic Nucleic acid
  misc_feature (31)..(31): n stands for inosine
ggcgccggcugaugaggccguuaggccgaancuagcuc

SEQ ID NO: 4606 - RNA, 38 nt, Artificial Sequence
  Description of Artificial Sequence:  Enzymatic Nucleic acid
  misc_feature (31)..(31): n stands for inosine
cggcgccgcugaugaggccguuaggccgaangcuagcu

SEQ ID NO: 4607 - RNA, 38 nt, Artificial Sequence
  Description of Artificial Sequence:  Enzymatic Nucleic acid
  misc_feature (31)..(31): n stands for inosine
gcggcgcccugaugaggccguuaggccgaanggcuagc

SEQ ID NO: 4608 - RNA, 38 nt, Artificial Sequence
  Description of Artificial Sequence:  Enzymatic Nucleic acid
  misc_feature (31)..(31): n stands for inosine
gcggcggccugaugaggccguuaggccgaancgccggg

SEQ ID NO: 4609 - RNA, 38 nt, Artificial Sequence
  Description of Artificial Sequence:  Enzymatic Nucleic acid
  misc_feature (31)..(31): n stands for inosine
ugggcggccugaugaggccguuaggccgaancggcgcc

SEQ ID NO: 4610 - RNA, 38 nt, Artificial Sequence
  Description of Artificial Sequence:  Enzymatic Nucleic acid
  misc_feature (31)..(31): n stands for inosine
gucugggccugaugaggccguuaggccgaancggcggc

SEQ ID NO: 4611 - RNA, 38 nt, Artificial Sequence
  Description of Artificial Sequence:  Enzymatic Nucleic acid
  misc_feature (31)..(31): n stands for inosine
ccggucugcugaugaggccguuaggccgaancggcggc

SEQ ID NO: 4612 - RNA, 38 nt, Artificial Sequence
  Description of Artificial Sequence:  Enzymatic Nucleic acid
  misc_feature (31)..(31): n stands for inosine
uccggucucugaugaggccguuaggccgaangcggcgg

SEQ ID NO: 4613 - RNA, 38 nt, Artificial Sequence
  Description of Artificial Sequence:  Enzymatic Nucleic acid
  misc_feature (31)..(31): n stands for inosine
guccgguccugaugaggccguuaggccgaanggcggcg

SEQ ID NO: 4614 - RNA, 38 nt, Artificial Sequence
  Description of Artificial Sequence:  Enzymatic Nucleic acid
  misc_feature (31)..(31): n stands for inosine
ugucgucccugaugaggccguuaggccgaanucugggc

SEQ ID NO: 4615 - RNA, 38 nt, Artificial Sequence
  Description of Artificial Sequence:  Enzymatic Nucleic acid
  misc_feature (31)..(31): n stands for inosine
agguggcccugaugaggccguuaggccgaanucguccg

SEQ ID NO: 4616 - RNA, 38 nt, Artificial Sequence
  Description of Artificial Sequence:  Enzymatic Nucleic acid
  misc_feature (31)..(31): n stands for inosine
gacgaggucugaugaggccguuaggccgaanccugucg

SEQ ID NO: 4617 - RNA, 38 nt, Artificial Sequence
  Description of Artificial Sequence:  Enzymatic Nucleic acid
  misc_feature (31)..(31): n stands for inosine
cgacgaggcugaugaggccguuaggccgaangccuguc

SEQ ID NO: 4618 - RNA, 38 nt, Artificial Sequence
  Description of Artificial Sequence:  Enzymatic Nucleic acid
  misc_feature (31)..(31): n stands for inosine
gccgacgacugaugaggccguuaggccgaanuggccug

SEQ ID NO: 4619 - RNA, 38 nt, Artificial Sequence
  Description of Artificial Sequence:  Enzymatic Nucleic acid
  misc_feature (31)..(31): n stands for inosine
cgccgacgcugaugaggccguuaggccgaanguggccu

SEQ ID NO: 4620 - RNA, 38 nt, Artificial Sequence
  Description of Artificial Sequence:  Enzymatic Nucleic acid
  misc_feature (31)..(31): n stands for inosine
acucgggccugaugaggccguuaggccgaanacgccga

SEQ ID NO: 4621 - RNA, 38 nt, Artificial Sequence
  Description of Artificial Sequence:  Enzymatic Nucleic acid
  misc_feature (31)..(31): n stands for inosine
gggacucgcugaugaggccguuaggccgaancggacgc

SEQ ID NO: 4622 - RNA, 38 nt, Artificial Sequence
  Description of Artificial Sequence:  Enzymatic Nucleic acid
  misc_feature (31)..(31): n stands for inosine
ggggacuccugaugaggccguuaggccgaangcggacg

SEQ ID NO: 4623 - RNA, 38 nt, Artificial Sequence
  Description of Artificial Sequence:  Enzymatic Nucleic acid
  misc_feature (31)..(31): n stands for inosine
cgaggcggcugaugaggccguuaggccgaanacucggg

SEQ ID NO: 4624 - RNA, 38 nt, Artificial Sequence
  Description of Artificial Sequence:  Enzymatic Nucleic acid
  misc_feature (31)..(31): n stands for inosine
gcgaggcgcugaugaggccguuaggccgaangacucgg

SEQ ID NO: 4625 - RNA, 38 nt, Artificial Sequence
  Description of Artificial Sequence:  Enzymatic Nucleic acid
  misc_feature (31)..(31): n stands for inosine
ggcgaggccugaugaggccguuaggccgaanggacucg

SEQ ID NO: 4626 - RNA, 38 nt, Artificial Sequence
  Description of Artificial Sequence:  Enzymatic Nucleic acid
  misc_feature (31)..(31): n stands for inosine
ggcggcgacugaugaggccguuaggccgaancggggac

SEQ ID NO: 4627 - RNA, 38 nt, Artificial Sequence
  Description of Artificial Sequence:  Enzymatic Nucleic acid
  misc_feature (31)..(31): n stands for inosine
uggcggcgcugaugaggccguuaggccgaangcgggga

SEQ ID NO: 4628 - RNA, 38 nt, Artificial Sequence
  Description of Artificial Sequence:  Enzymatic Nucleic acid
  misc_feature (31)..(31): n stands for inosine
gcguuggccugaugaggccguuaggccgaancgaggcg

SEQ ID NO: 4629 - RNA, 38 nt, Artificial Sequence
  Description of Artificial Sequence:  Enzymatic Nucleic acid
  misc_feature (31)..(31): n stands for inosine
guggcguucugaugaggccguuaggccgaancggcgag

SEQ ID NO: 4630 - RNA, 38 nt, Artificial Sequence
  Description of Artificial Sequence:  Enzymatic Nucleic acid
  misc_feature (31)..(31): n stands for inosine
uguggcgucugaugaggccguuaggccgaangcggcga

SEQ ID NO: 4631 - RNA, 38 nt, Artificial Sequence
  Description of Artificial Sequence:  Enzymatic Nucleic acid
  misc_feature (31)..(31): n stands for inosine
gugguugucugaugaggccguuaggccgaancguuggc

SEQ ID NO: 4632 - RNA, 38 nt, Artificial Sequence
  Description of Artificial Sequence:  Enzymatic Nucleic acid
  misc_feature (31)..(31): n stands for inosine
ggugguugcugaugaggccguuaggccgaangcguugg

SEQ ID NO: 4633 - RNA, 38 nt, Artificial Sequence
  Description of Artificial Sequence:  Enzymatic Nucleic acid
  misc_feature (31)..(31): n stands for inosine
gcgguggucugaugaggccguuaggccgaanuggcguu

SEQ ID NO: 4634 - RNA, 38 nt, Artificial Sequence
  Description of Artificial Sequence:  Enzymatic Nucleic acid
  misc_feature (31)..(31): n stands for inosine
ugcgcggucugaugaggccguuaggccgaanuuguggc

SEQ ID NO: 4635 - RNA, 38 nt, Artificial Sequence
  Description of Artificial Sequence:  Enzymatic Nucleic acid
  misc_feature (31)..(31): n stands for inosine
gugcgcggcugaugaggccguuaggccgaanguugugg

SEQ ID NO: 4636 - RNA, 38 nt, Artificial Sequence
  Description of Artificial Sequence:  Enzymatic Nucleic acid
  misc_feature (31)..(31): n stands for inosine
ccgugcgccugaugaggccguuaggccgaanugguugu

SEQ ID NO: 4637 - RNA, 38 nt, Artificial Sequence
  Description of Artificial Sequence:  Enzymatic Nucleic acid
  misc_feature (31)..(31): n stands for inosine
gggggccgcugaugaggccguuaggccgaancgcggug

SEQ ID NO: 4638 - RNA, 38 nt, Artificial Sequence
  Description of Artificial Sequence:  Enzymatic Nucleic acid
  misc_feature (31)..(31): n stands for inosine
agucagggcugaugaggccguuaggccgaanccgugcg

SEQ ID NO: 4639 - RNA, 38 nt, Artificial Sequence
  Description of Artificial Sequence:  Enzymatic Nucleic acid
  misc_feature (31)..(31): n stands for inosine
gagucaggcugaugaggccguuaggccgaangccgugc

SEQ ID NO: 4640 - RNA, 38 nt, Artificial Sequence
  Description of Artificial Sequence:  Enzymatic Nucleic acid
  misc_feature (31)..(31): n stands for inosine
ggagucagcugaugaggccguuaggccgaanggccgug

SEQ ID NO: 4641 - RNA, 38 nt, Artificial Sequence
  Description of Artificial Sequence:  Enzymatic Nucleic acid
  misc_feature (31)..(31): n stands for inosine
cggagucacugaugaggccguuaggccgaangggccgu

SEQ ID NO: 4642 - RNA, 38 nt, Artificial Sequence
  Description of Artificial Sequence:  Enzymatic Nucleic acid
  misc_feature (31)..(31): n stands for inosine
acggaguccugaugaggccguuaggccgaanggggccg

SEQ ID NO: 4643 - RNA, 38 nt, Artificial Sequence
  Description of Artificial Sequence:  Enzymatic Nucleic acid
  misc_feature (31)..(31): n stands for inosine
cuggacggcugaugaggccguuaggccgaanucagggg

SEQ ID NO: 4644 - RNA, 38 nt, Artificial Sequence
  Description of Artificial Sequence:  Enzymatic Nucleic acid
  misc_feature (31)..(31): n stands for inosine
uacuggaccugaugaggccguuaggccgaanagucagg

SEQ ID NO: 4645 - RNA, 38 nt, Artificial Sequence
  Description of Artificial Sequence:  Enzymatic Nucleic acid
  misc_feature (31)..(31): n stands for inosine
ucaauacucugaugaggccguuaggccgaanacggagu

SEQ ID NO: 4646 - RNA, 38 nt, Artificial Sequence
  Description of Artificial Sequence:  Enzymatic Nucleic acid
  misc_feature (31)..(31): n stands for inosine
aucaauaccugaugaggccguuaggccgaangacggag

SEQ ID NO: 4647 - RNA, 38 nt, Artificial Sequence
  Description of Artificial Sequence:  Enzymatic Nucleic acid
  misc_feature (31)..(31): n stands for inosine
cucgcucccugaugaggccguuaggccgaancucuccc

SEQ ID NO: 4648 - RNA, 38 nt, Artificial Sequence
  Description of Artificial Sequence:  Enzymatic Nucleic acid
  misc_feature (31)..(31): n stands for inosine
ccccgaagcugaugaggccguuaggccgaancucgcuc

SEQ ID NO: 4649 - RNA, 38 nt, Artificial Sequence
  Description of Artificial Sequence:  Enzymatic Nucleic acid
  misc_feature (31)..(31): n stands for inosine
cuccccgacugaugaggccguuaggccgaanagcucgc

SEQ ID NO: 4650 - RNA, 38 nt, Artificial Sequence
  Description of Artificial Sequence:  Enzymatic Nucleic acid
  misc_feature (31)..(31): n stands for inosine
cgcaucgccugaugaggccguuaggccgaancuccccg

SEQ ID NO: 4651 - RNA, 38 nt, Artificial Sequence
  Description of Artificial Sequence:  Enzymatic Nucleic acid
  misc_feature (31)..(31): n stands for inosine
ucccggagcugaugaggccguuaggccgaanucgcauc

SEQ ID NO: 4652 - RNA, 38 nt, Artificial Sequence
  Description of Artificial Sequence:  Enzymatic Nucleic acid
  misc_feature (31)..(31): n stands for inosine
gucccggacugaugaggccguuaggccgaangucgcau

SEQ ID NO: 4653 - RNA, 38 nt, Artificial Sequence
  Description of Artificial Sequence:  Enzymatic Nucleic acid
  misc_feature (31)..(31): n stands for inosine
cgucccggcugaugaggccguuaggccgaanggucgca

SEQ ID NO: 4654 - RNA, 38 nt, Artificial Sequence
  Description of Artificial Sequence:  Enzymatic Nucleic acid
  misc_feature (31)..(31): n stands for inosine
gccguccccugaugaggccguuaggccgaanagggucg

SEQ ID NO: 4655 - RNA, 38 nt, Artificial Sequence
  Description of Artificial Sequence:  Enzymatic Nucleic acid
  misc_feature (31)..(31): n stands for inosine
gcugcccccugaugaggccguuaggccgaanccguccc

SEQ ID NO: 4656 - RNA, 38 nt, Artificial Sequence
  Description of Artificial Sequence:  Enzymatic Nucleic acid
  misc_feature (31)..(31): n stands for inosine
aggagcgccugaugaggccguuaggccgaanccccggc

SEQ ID NO: 4657 - RNA, 38 nt, Artificial Sequence
  Description of Artificial Sequence:  Enzymatic Nucleic acid
  misc_feature (31)..(31): n stands for inosine
gcgccaggcugaugaggccguuaggccgaancgcugcc

SEQ ID NO: 4658 - RNA, 38 nt, Artificial Sequence
  Description of Artificial Sequence:  Enzymatic Nucleic acid
  misc_feature (31)..(31): n stands for inosine
cagcgccacugaugaggccguuaggccgaanagcgcug

SEQ ID NO: 4659 - RNA, 38 nt, Artificial Sequence
  Description of Artificial Sequence:  Enzymatic Nucleic acid
  misc_feature (31)..(31): n stands for inosine
gcagcgcccugaugaggccguuaggccgaangagcgcu

SEQ ID NO: 4660 - RNA, 38 nt, Artificial Sequence
  Description of Artificial Sequence:  Enzymatic Nucleic acid
  misc_feature (31)..(31): n stands for inosine
cagccagccugaugaggccguuaggccgaancgccagg

SEQ ID NO: 4661 - RNA, 38 nt, Artificial Sequence
  Description of Artificial Sequence:  Enzymatic Nucleic acid
  misc_feature (31)..(31): n stands for inosine
gcgcagcccugaugaggccguuaggccgaancagcgcc

SEQ ID NO: 4662 - RNA, 38 nt, Artificial Sequence
  Description of Artificial Sequence:  Enzymatic Nucleic acid
  misc_feature (31)..(31): n stands for inosine
cagagcgccugaugaggccguuaggccgaanccagcag

SEQ ID NO: 4663 - RNA, 38 nt, Artificial Sequence
  Description of Artificial Sequence:  Enzymatic Nucleic acid
  misc_feature (31)..(31): n stands for inosine
ccgggcagcugaugaggccguuaggccgaancgcagcc

SEQ ID NO: 4664 - RNA, 38 nt, Artificial Sequence
  Description of Artificial Sequence:  Enzymatic Nucleic acid
  misc_feature (31)..(31): n stands for inosine
cgccgggccugaugaggccguuaggccgaanagcgcag

SEQ ID NO: 4665 - RNA, 38 nt, Artificial Sequence
  Description of Artificial Sequence:  Enzymatic Nucleic acid
  misc_feature (31)..(31): n stands for inosine
acucgccgcugaugaggccguuaggccgaancagagcg

SEQ ID NO: 4666 - RNA, 38 nt, Artificial Sequence
  Description of Artificial Sequence:  Enzymatic Nucleic acid
  misc_feature (31)..(31): n stands for inosine
gacucgcccugaugaggccguuaggccgaangcagagc

SEQ ID NO: 4667 - RNA, 38 nt, Artificial Sequence
  Description of Artificial Sequence:  Enzymatic Nucleic acid
  misc_feature (31)..(31): n stands for inosine
uccuccagcugaugaggccguuaggccgaancccgacu

SEQ ID NO: 4668 - RNA, 38 nt, Artificial Sequence
  Description of Artificial Sequence:  Enzymatic Nucleic acid
  misc_feature (31)..(31): n stands for inosine
uuuccucccugaugaggccguuaggccgaanagcccga

SEQ ID NO: 4669 - RNA, 38 nt, Artificial Sequence
  Description of Artificial Sequence:  Enzymatic Nucleic acid
  misc_feature (31)..(31): n stands for inosine
cgugccuucugaugaggccguuaggccgaancaaacuu

SEQ ID NO: 4670 - RNA, 38 nt, Artificial Sequence
  Description of Artificial Sequence:  Enzymatic Nucleic acid
  misc_feature (31)..(31): n stands for inosine
ucgugccucugaugaggccguuaggccgaangcaaacu

SEQ ID NO: 4671 - RNA, 38 nt, Artificial Sequence
  Description of Artificial Sequence:  Enzymatic Nucleic acid
  misc_feature (31)..(31): n stands for inosine
guuacucgcugaugaggccguuaggccgaanccuuggc

SEQ ID NO: 4672 - RNA, 38 nt, Artificial Sequence
  Description of Artificial Sequence:  Enzymatic Nucleic acid
  misc_feature (31)..(31): n stands for inosine
cgugagcucugaugaggccguuaggccgaanuuacucg

SEQ ID NO: 4673 - RNA, 38 nt, Artificial Sequence
  Description of Artificial Sequence:  Enzymatic Nucleic acid
  misc_feature (31)..(31): n stands for inosine
acugcgugcugaugaggccguuaggccgaancuuguua

SEQ ID NO: 4674 - RNA, 38 nt, Artificial Sequence
  Description of Artificial Sequence:  Enzymatic Nucleic acid
  misc_feature (31)..(31): n stands for inosine
caacugcgcugaugaggccguuaggccgaanagcuugu

SEQ ID NO: 4675 - RNA, 38 nt, Artificial Sequence
  Description of Artificial Sequence:  Enzymatic Nucleic acid
  misc_feature (31)..(31): n stands for inosine
ugcccaaccugaugaggccguuaggccgaancgugagc

SEQ ID NO: 4676 - RNA, 38 nt, Artificial Sequence
  Description of Artificial Sequence:  Enzymatic Nucleic acid
  misc_feature (31)..(31): n stands for inosine
uucaaaagcugaugaggccguuaggccgaancccaacu

SEQ ID NO: 4677 - RNA, 38 nt, Artificial Sequence
  Description of Artificial Sequence:  Enzymatic Nucleic acid
  misc_feature (31)..(31): n stands for inosine
ucuucaaacugaugaggccguuaggccgaanugcccaa

SEQ ID NO: 4678 - RNA, 38 nt, Artificial Sequence
  Description of Artificial Sequence:  Enzymatic Nucleic acid
  misc_feature (31)..(31): n stands for inosine
ugagaaaacugaugaggccguuaggccgaanaucuuca

SEQ ID NO: 4679 - RNA, 38 nt, Artificial Sequence
  Description of Artificial Sequence:  Enzymatic Nucleic acid
  misc_feature (31)..(31): n stands for inosine
ggaggcugcugaugaggccguuaggccgaanaaaauga

SEQ ID NO: 4680 - RNA, 38 nt, Artificial Sequence
  Description of Artificial Sequence:  Enzymatic Nucleic acid
  misc_feature (31)..(31): n stands for inosine
cuggaggccugaugaggccguuaggccgaanagaaaau

SEQ ID NO: 4681 - RNA, 38 nt, Artificial Sequence
  Description of Artificial Sequence:  Enzymatic Nucleic acid
  misc_feature (31)..(31): n stands for inosine
ccucuggacugaugaggccguuaggccgaancugagaa

SEQ ID NO: 4682 - RNA, 38 nt, Artificial Sequence
  Description of Artificial Sequence:  Enzymatic Nucleic acid
  misc_feature (31)..(31): n stands for inosine
uccucuggcugaugaggccguuaggccgaangcugaga

SEQ ID NO: 4683 - RNA, 38 nt, Artificial Sequence
  Description of Artificial Sequence:  Enzymatic Nucleic acid
  misc_feature (31)..(31): n stands for inosine
cauccucucugaugaggccguuaggccgaanaggcuga

SEQ ID NO: 4684 - RNA, 38 nt, Artificial Sequence
  Description of Artificial Sequence:  Enzymatic Nucleic acid
  misc_feature (31)..(31): n stands for inosine
acauccuccugaugaggccguuaggccgaangaggcug

SEQ ID NO: 4685 - RNA, 38 nt, Artificial Sequence
  Description of Artificial Sequence:  Enzymatic Nucleic acid
  misc_feature (31)..(31): n stands for inosine
acaguuaucugaugaggccguuaggccgaanaacaucc

SEQ ID NO: 4686 - RNA, 38 nt, Artificial Sequence
  Description of Artificial Sequence:  Enzymatic Nucleic acid
  misc_feature (31)..(31): n stands for inosine
caccucaccugaugaggccguuaggccgaanuuauuga

SEQ ID NO: 4687 - RNA, 38 nt, Artificial Sequence
  Description of Artificial Sequence:  Enzymatic Nucleic acid
  misc_feature (31)..(31): n stands for inosine
auucccaacugaugaggccguuaggccgaanaccaccu

SEQ ID NO: 4688 - RNA, 38 nt, Artificial Sequence
  Description of Artificial Sequence:  Enzymatic Nucleic acid
  misc_feature (31)..(31): n stands for inosine
aauucccacugaugaggccguuaggccgaangaccacc

SEQ ID NO: 4689 - RNA, 38 nt, Artificial Sequence
  Description of Artificial Sequence:  Enzymatic Nucleic acid
  misc_feature (31)..(31): n stands for inosine
ugcacauacugaugaggccguuaggccgaanuaauuuc

SEQ ID NO: 4690 - RNA, 38 nt, Artificial Sequence
  Description of Artificial Sequence:  Enzymatic Nucleic acid
  misc_feature (31)..(31): n stands for inosine
cugcacaucugaugaggccguuaggccgaanguaauuu

SEQ ID NO: 4691 - RNA, 38 nt, Artificial Sequence
  Description of Artificial Sequence:  Enzymatic Nucleic acid
  misc_feature (31)..(31): n stands for inosine
aauuccuccugaugaggccguuaggccgaancacauag

SEQ ID NO: 4692 - RNA, 38 nt, Artificial Sequence
  Description of Artificial Sequence:  Enzymatic Nucleic acid
  misc_feature (31)..(31): n stands for inosine
agaaggaacugaugaggccguuaggccgaanaucauaa

SEQ ID NO: 4693 - RNA, 38 nt, Artificial Sequence
  Description of Artificial Sequence:  Enzymatic Nucleic acid
  misc_feature (31)..(31): n stands for inosine
uuuaagaacugaugaggccguuaggccgaanaaagauc

SEQ ID NO: 4694 - RNA, 38 nt, Artificial Sequence
  Description of Artificial Sequence:  Enzymatic Nucleic acid
  misc_feature (31)..(31): n stands for inosine
cuuuaagacugaugaggccguuaggccgaangaaagau

SEQ ID NO: 4695 - RNA, 38 nt, Artificial Sequence
  Description of Artificial Sequence:  Enzymatic Nucleic acid
  misc_feature (31)..(31): n stands for inosine
ggucuuuacugaugaggccguuaggccgaanaaggaaa

SEQ ID NO: 4696 - RNA, 38 nt, Artificial Sequence
  Description of Artificial Sequence:  Enzymatic Nucleic acid
  misc_feature (31)..(31): n stands for inosine
uccuggaucugaugaggccguuaggccgaanucuuuaa

SEQ ID NO: 4697 - RNA, 38 nt, Artificial Sequence
  Description of Artificial Sequence:  Enzymatic Nucleic acid
  misc_feature (31)..(31): n stands for inosine
cuccuggacugaugaggccguuaggccgaangucuuua

SEQ ID NO: 4698 - RNA, 38 nt, Artificial Sequence
  Description of Artificial Sequence:  Enzymatic Nucleic acid
  misc_feature (31)..(31): n stands for inosine
caccuccucugaugaggccguuaggccgaanauggucu

SEQ ID NO: 4699 - RNA, 38 nt, Artificial Sequence
  Description of Artificial Sequence:  Enzymatic Nucleic acid
  misc_feature (31)..(31): n stands for inosine
ccaccucccugaugaggccguuaggccgaangaugguc

SEQ ID NO: 4700 - RNA, 38 nt, Artificial Sequence
  Description of Artificial Sequence:  Enzymatic Nucleic acid
  misc_feature (31)..(31): n stands for inosine
acauaacccugaugaggccguuaggccgaanccaccuc

SEQ ID NO: 4701 - RNA, 38 nt, Artificial Sequence
  Description of Artificial Sequence:  Enzymatic Nucleic acid
  misc_feature (31)..(31): n stands for inosine
ggcaaugacugaugaggccguuaggccgaanacauaac

SEQ ID NO: 4702 - RNA, 38 nt, Artificial Sequence
  Description of Artificial Sequence:  Enzymatic Nucleic acid
  misc_feature (31)..(31): n stands for inosine
gggcaaugcugaugaggccguuaggccgaangacauaa

SEQ ID NO: 4703 - RNA, 38 nt, Artificial Sequence
  Description of Artificial Sequence:  Enzymatic Nucleic acid
  misc_feature (31)..(31): n stands for inosine
gagggcaacugaugaggccguuaggccgaanaggacau

SEQ ID NO: 4704 - RNA, 38 nt, Artificial Sequence
  Description of Artificial Sequence:  Enzymatic Nucleic acid
  misc_feature (31)..(31): n stands for inosine
guguugagcugaugaggccguuaggccgaancaaugag

SEQ ID NO: 4705 - RNA, 38 nt, Artificial Sequence
  Description of Artificial Sequence:  Enzymatic Nucleic acid
  misc_feature (31)..(31): n stands for inosine
uguguugacugaugaggccguuaggccgaangcaauga

SEQ ID NO: 4706 - RNA, 38 nt, Artificial Sequence
  Description of Artificial Sequence:  Enzymatic Nucleic acid
  misc_feature (31)..(31): n stands for inosine
cuguguugcugaugaggccguuaggccgaanggcaaug

SEQ ID NO: 4707 - RNA, 38 nt, Artificial Sequence
  Description of Artificial Sequence:  Enzymatic Nucleic acid
  misc_feature (31)..(31): n stands for inosine
cacugugucugaugaggccguuaggccgaanagggcaa

SEQ ID NO: 4708 - RNA, 38 nt, Artificial Sequence
  Description of Artificial Sequence:  Enzymatic Nucleic acid
  misc_feature (31)..(31): n stands for inosine
cuccacugcugaugaggccguuaggccgaanuugaggg

SEQ ID NO: 4709 - RNA, 38 nt, Artificial Sequence
  Description of Artificial Sequence:  Enzymatic Nucleic acid
  misc_feature (31)..(31): n stands for inosine
cgcuccaccugaugaggccguuaggccgaanuguugag

SEQ ID NO: 4710 - RNA, 38 nt, Artificial Sequence
  Description of Artificial Sequence:  Enzymatic Nucleic acid
  misc_feature (31)..(31): n stands for inosine
uuuccaaacugaugaggccguuaggccgaanaauucgc

SEQ ID NO: 4711 - RNA, 38 nt, Artificial Sequence
  Description of Artificial Sequence:  Enzymatic Nucleic acid
  misc_feature (31)..(31): n stands for inosine
uuuuccaacugaugaggccguuaggccgaangaauucg

SEQ ID NO: 4712 - RNA, 38 nt, Artificial Sequence
  Description of Artificial Sequence:  Enzymatic Nucleic acid
  misc_feature (31)..(31): n stands for inosine
gaucugcacugaugaggccguuaggccgaanuuuucca

SEQ ID NO: 4713 - RNA, 38 nt, Artificial Sequence
  Description of Artificial Sequence:  Enzymatic Nucleic acid
  misc_feature (31)..(31): n stands for inosine
ugaucugccugaugaggccguuaggccgaanguuuucc

SEQ ID NO: 4714 - RNA, 38 nt, Artificial Sequence
  Description of Artificial Sequence:  Enzymatic Nucleic acid
  misc_feature (31)..(31): n stands for inosine
ugaugauccugaugaggccguuaggccgaancagguuu

SEQ ID NO: 4715 - RNA, 38 nt, Artificial Sequence
  Description of Artificial Sequence:  Enzymatic Nucleic acid
  misc_feature (31)..(31): n stands for inosine
uccucugacugaugaggccguuaggccgaanaucugca

SEQ ID NO: 4716 - RNA, 38 nt, Artificial Sequence
  Description of Artificial Sequence:  Enzymatic Nucleic acid
  misc_feature (31)..(31): n stands for inosine
auuuccuccugaugaggccguuaggccgaanaugaucu

SEQ ID NO: 4717 - RNA, 38 nt, Artificial Sequence
  Description of Artificial Sequence:  Enzymatic Nucleic acid
  misc_feature (31)..(31): n stands for inosine
auuuucgucugaugaggccguuaggccgaanuacauau

SEQ ID NO: 4718 - RNA, 38 nt, Artificial Sequence
  Description of Artificial Sequence:  Enzymatic Nucleic acid
  misc_feature (31)..(31): n stands for inosine
aaggcauacugaugaggccguuaggccgaanaauuuuc

SEQ ID NO: 4719 - RNA, 38 nt, Artificial Sequence
  Description of Artificial Sequence:  Enzymatic Nucleic acid
  misc_feature (31)..(31): n stands for inosine
uaaggcaucugaugaggccguuaggccgaangaauuuu

SEQ ID NO: 4720 - RNA, 38 nt, Artificial Sequence
  Description of Artificial Sequence:  Enzymatic Nucleic acid
  misc_feature (31)..(31): n stands for inosine
acugcuaacugaugaggccguuaggccgaancauagga

SEQ ID NO: 4721 - RNA, 38 nt, Artificial Sequence
  Description of Artificial Sequence:  Enzymatic Nucleic acid
  misc_feature (31)..(31): n stands for inosine
gacugcuacugaugaggccguuaggccgaangcauagg

SEQ ID NO: 4722 - RNA, 38 nt, Artificial Sequence
  Description of Artificial Sequence:  Enzymatic Nucleic acid
  misc_feature (31)..(31): n stands for inosine
gauaagaccugaugaggccguuaggccgaancuaaggc

SEQ ID NO: 4723 - RNA, 38 nt, Artificial Sequence
  Description of Artificial Sequence:  Enzymatic Nucleic acid
  misc_feature (31)..(31): n stands for inosine
guuagauacugaugaggccguuaggccgaanacugcua

SEQ ID NO: 4724 - RNA, 38 nt, Artificial Sequence
  Description of Artificial Sequence:  Enzymatic Nucleic acid
  misc_feature (31)..(31): n stands for inosine
ucauaguucugaugaggccguuaggccgaanauaagac

SEQ ID NO: 4725 - RNA, 38 nt, Artificial Sequence
  Description of Artificial Sequence:  Enzymatic Nucleic acid
  misc_feature (31)..(31): n stands for inosine
ugcaucaucugaugaggccguuaggccgaanuuagaua

SEQ ID NO: 4726 - RNA, 38 nt, Artificial Sequence
  Description of Artificial Sequence:  Enzymatic Nucleic acid
  misc_feature (31)..(31): n stands for inosine
guuuuauucugaugaggccguuaggccgaancaucaua

SEQ ID NO: 4727 - RNA, 38 nt, Artificial Sequence
  Description of Artificial Sequence:  Enzymatic Nucleic acid
  misc_feature (31)..(31): n stands for inosine
uucagucccugaugaggccguuaggccgaanuuuuauu

SEQ ID NO: 4728 - RNA, 38 nt, Artificial Sequence
  Description of Artificial Sequence:  Enzymatic Nucleic acid
  misc_feature (31)..(31): n stands for inosine
gcuccuuccugaugaggccguuaggccgaanuccgguu

SEQ ID NO: 4729 - RNA, 38 nt, Artificial Sequence
  Description of Artificial Sequence:  Enzymatic Nucleic acid
  misc_feature (31)..(31): n stands for inosine
ucaugggccugaugaggccguuaggccgaancuccuuc

SEQ ID NO: 4730 - RNA, 38 nt, Artificial Sequence
  Description of Artificial Sequence:  Enzymatic Nucleic acid
  misc_feature (31)..(31): n stands for inosine
uucucaugcugaugaggccguuaggccgaancagcucc

SEQ ID NO: 4731 - RNA, 38 nt, Artificial Sequence
  Description of Artificial Sequence:  Enzymatic Nucleic acid
  misc_feature (31)..(31): n stands for inosine
uuucucaucugaugaggccguuaggccgaangcagcuc

SEQ ID NO: 4732 - RNA, 38 nt, Artificial Sequence
  Description of Artificial Sequence:  Enzymatic Nucleic acid
  misc_feature (31)..(31): n stands for inosine
auuucucacugaugaggccguuaggccgaanggcagcu

SEQ ID NO: 4733 - RNA, 38 nt, Artificial Sequence
  Description of Artificial Sequence:  Enzymatic Nucleic acid
  misc_feature (31)..(31): n stands for inosine
ggauuucccugaugaggccguuaggccgaanuaaauuu

SEQ ID NO: 4734 - RNA, 38 nt, Artificial Sequence
  Description of Artificial Sequence:  Enzymatic Nucleic acid
  misc_feature (31)..(31): n stands for inosine
gccaugcacugaugaggccguuaggccgaanauuuccu

SEQ ID NO: 4735 - RNA, 38 nt, Artificial Sequence
  Description of Artificial Sequence:  Enzymatic Nucleic acid
  misc_feature (31)..(31): n stands for inosine
cgccaugccugaugaggccguuaggccgaangauuucc

SEQ ID NO: 4736 - RNA, 38 nt, Artificial Sequence
  Description of Artificial Sequence:  Enzymatic Nucleic acid
  misc_feature (31)..(31): n stands for inosine
cggcgccacugaugaggccguuaggccgaancaggauu

SEQ ID NO: 4737 - RNA, 38 nt, Artificial Sequence
  Description of Artificial Sequence:  Enzymatic Nucleic acid
  misc_feature (31)..(31): n stands for inosine
aaccgcaccugaugaggccguuaggccgaancgccaug

SEQ ID NO: 4738 - RNA, 38 nt, Artificial Sequence
  Description of Artificial Sequence:  Enzymatic Nucleic acid
  misc_feature (31)..(31): n stands for inosine
guuguugccugaugaggccguuaggccgaanaaccgca

SEQ ID NO: 4739 - RNA, 38 nt, Artificial Sequence
  Description of Artificial Sequence:  Enzymatic Nucleic acid
  misc_feature (31)..(31): n stands for inosine
aggguugucugaugaggccguuaggccgaancugaacc

SEQ ID NO: 4740 - RNA, 38 nt, Artificial Sequence
  Description of Artificial Sequence:  Enzymatic Nucleic acid
  misc_feature (31)..(31): n stands for inosine
ggcagggucugaugaggccguuaggccgaanuugcuga

SEQ ID NO: 4741 - RNA, 38 nt, Artificial Sequence
  Description of Artificial Sequence:  Enzymatic Nucleic acid
  misc_feature (31)..(31): n stands for inosine
cagggcagcugaugaggccguuaggccgaanuuguugc

SEQ ID NO: 4742 - RNA, 38 nt, Artificial Sequence
  Description of Artificial Sequence:  Enzymatic Nucleic acid
  misc_feature (31)..(31): n stands for inosine
acagggcacugaugaggccguuaggccgaanguuguug

SEQ ID NO: 4743 - RNA, 38 nt, Artificial Sequence
  Description of Artificial Sequence:  Enzymatic Nucleic acid
  misc_feature (31)..(31): n stands for inosine
cacagggccugaugaggccguuaggccgaangguuguu

SEQ ID NO: 4744 - RNA, 38 nt, Artificial Sequence
  Description of Artificial Sequence:  Enzymatic Nucleic acid
  misc_feature (31)..(31): n stands for inosine
uugcacagcugaugaggccguuaggccgaancaggguu

SEQ ID NO: 4745 - RNA, 38 nt, Artificial Sequence
  Description of Artificial Sequence:  Enzymatic Nucleic acid
  misc_feature (31)..(31): n stands for inosine
guugcacacugaugaggccguuaggccgaangcagggu

SEQ ID NO: 4746 - RNA, 38 nt, Artificial Sequence
  Description of Artificial Sequence:  Enzymatic Nucleic acid
  misc_feature (31)..(31): n stands for inosine
cguugcaccugaugaggccguuaggccgaanggcaggg

SEQ ID NO: 4747 - RNA, 38 nt, Artificial Sequence
  Description of Artificial Sequence:  Enzymatic Nucleic acid
  misc_feature (31)..(31): n stands for inosine
cuccacgucugaugaggccguuaggccgaancacaggg

SEQ ID NO: 4748 - RNA, 38 nt, Artificial Sequence
  Description of Artificial Sequence:  Enzymatic Nucleic acid
  misc_feature (31)..(31): n stands for inosine
ccacuggacugaugaggccguuaggccgaancucucca

SEQ ID NO: 4749 - RNA, 38 nt, Artificial Sequence
  Description of Artificial Sequence:  Enzymatic Nucleic acid
  misc_feature (31)..(31): n stands for inosine
ccgccacucugaugaggccguuaggccgaanaugcucu

SEQ ID NO: 4750 - RNA, 38 nt, Artificial Sequence
  Description of Artificial Sequence:  Enzymatic Nucleic acid
  misc_feature (31)..(31): n stands for inosine
cccgccaccugaugaggccguuaggccgaangaugcuc

SEQ ID NO: 4751 - RNA, 38 nt, Artificial Sequence
  Description of Artificial Sequence:  Enzymatic Nucleic acid
  misc_feature (31)..(31): n stands for inosine
gcugacuacugaugaggccguuaggccgaanucccgcc

SEQ ID NO: 4752 - RNA, 38 nt, Artificial Sequence
  Description of Artificial Sequence:  Enzymatic Nucleic acid
  misc_feature (31)..(31): n stands for inosine
gucacugccugaugaggccguuaggccgaanacuaugu

SEQ ID NO: 4753 - RNA, 38 nt, Artificial Sequence
  Description of Artificial Sequence:  Enzymatic Nucleic acid
  misc_feature (31)..(31): n stands for inosine
aaagucaccugaugaggccguuaggccgaancugacua

SEQ ID NO: 4754 - RNA, 38 nt, Artificial Sequence
  Description of Artificial Sequence:  Enzymatic Nucleic acid
  misc_feature (31)..(31): n stands for inosine
gcugagaacugaugaggccguuaggccgaanucacugc

SEQ ID NO: 4755 - RNA, 38 nt, Artificial Sequence
  Description of Artificial Sequence:  Enzymatic Nucleic acid
  misc_feature (31)..(31): n stands for inosine
uguugcugcugaugaggccguuaggccgaanaaaguca

SEQ ID NO: 4756 - RNA, 38 nt, Artificial Sequence
  Description of Artificial Sequence:  Enzymatic Nucleic acid
  misc_feature (31)..(31): n stands for inosine
cauguugccugaugaggccguuaggccgaanagaaagu

SEQ ID NO: 4757 - RNA, 38 nt, Artificial Sequence
  Description of Artificial Sequence:  Enzymatic Nucleic acid
  misc_feature (31)..(31): n stands for inosine
cgacaugucugaugaggccguuaggccgaancugagaa

SEQ ID NO: 4758 - RNA, 38 nt, Artificial Sequence
  Description of Artificial Sequence:  Enzymatic Nucleic acid
  misc_feature (31)..(31): n stands for inosine
caucgacacugaugaggccguuaggccgaanuugcuga

SEQ ID NO: 4759 - RNA, 38 nt, Artificial Sequence
  Description of Artificial Sequence:  Enzymatic Nucleic acid
  misc_feature (31)..(31): n stands for inosine
guucuggacugaugaggccguuaggccgaanuccaucg

SEQ ID NO: 4760 - RNA, 38 nt, Artificial Sequence
  Description of Artificial Sequence:  Enzymatic Nucleic acid
  misc_feature (31)..(31): n stands for inosine
gugguucucugaugaggccguuaggccgaanaagucca

SEQ ID NO: 4761 - RNA, 38 nt, Artificial Sequence
  Description of Artificial Sequence:  Enzymatic Nucleic acid
  misc_feature (31)..(31): n stands for inosine
ggugguuccugaugaggccguuaggccgaangaagucc

SEQ ID NO: 4762 - RNA, 38 nt, Artificial Sequence
  Description of Artificial Sequence:  Enzymatic Nucleic acid
  misc_feature (31)..(31): n stands for inosine
gcccaggucugaugaggccguuaggccgaanuucugga

SEQ ID NO: 4763 - RNA, 38 nt, Artificial Sequence
  Description of Artificial Sequence:  Enzymatic Nucleic acid
  misc_feature (31)..(31): n stands for inosine
ugcccaggcugaugaggccguuaggccgaanguucugg

SEQ ID NO: 4764 - RNA, 38 nt, Artificial Sequence
  Description of Artificial Sequence:  Enzymatic Nucleic acid
  misc_feature (31)..(31): n stands for inosine
gcugcccacugaugaggccguuaggccgaanugguucu

SEQ ID NO: 4765 - RNA, 38 nt, Artificial Sequence
  Description of Artificial Sequence:  Enzymatic Nucleic acid
  misc_feature (31)..(31): n stands for inosine
agcugccccugaugaggccguuaggccgaangugguuc

SEQ ID NO: 4766 - RNA, 38 nt, Artificial Sequence
  Description of Artificial Sequence:  Enzymatic Nucleic acid
  misc_feature (31)..(31): n stands for inosine
uuggcagccugaugaggccguuaggccgaancccaggu

SEQ ID NO: 4767 - RNA, 38 nt, Artificial Sequence
  Description of Artificial Sequence:  Enzymatic Nucleic acid
  misc_feature (31)..(31): n stands for inosine
cuuuuggccugaugaggccguuaggccgaancugccca

SEQ ID NO: 4768 - RNA, 38 nt, Artificial Sequence
  Description of Artificial Sequence:  Enzymatic Nucleic acid
  misc_feature (31)..(31): n stands for inosine
acacuuuucugaugaggccguuaggccgaancagcugc

SEQ ID NO: 4769 - RNA, 38 nt, Artificial Sequence
  Description of Artificial Sequence:  Enzymatic Nucleic acid
  misc_feature (31)..(31): n stands for inosine
cacacuuucugaugaggccguuaggccgaangcagcug

SEQ ID NO: 4770 - RNA, 38 nt, Artificial Sequence
  Description of Artificial Sequence:  Enzymatic Nucleic acid
  misc_feature (31)..(31): n stands for inosine
gacagcuucugaugaggccguuaggccgaanaucacac

SEQ ID NO: 4771 - RNA, 38 nt, Artificial Sequence
  Description of Artificial Sequence:  Enzymatic Nucleic acid
  misc_feature (31)..(31): n stands for inosine
ggacagcucugaugaggccguuaggccgaangaucaca

SEQ ID NO: 4772 - RNA, 38 nt, Artificial Sequence
  Description of Artificial Sequence:  Enzymatic Nucleic acid
  misc_feature (31)..(31): n stands for inosine
auugggaccugaugaggccguuaggccgaancuuggau

SEQ ID NO: 4773 - RNA, 38 nt, Artificial Sequence
  Description of Artificial Sequence:  Enzymatic Nucleic acid
  misc_feature (31)..(31): n stands for inosine
ucccauugcugaugaggccguuaggccgaanacagcuu

SEQ ID NO: 4774 - RNA, 38 nt, Artificial Sequence
  Description of Artificial Sequence:  Enzymatic Nucleic acid
  misc_feature (31)..(31): n stands for inosine
cucccauucugaugaggccguuaggccgaangacagcu

SEQ ID NO: 4775 - RNA, 38 nt, Artificial Sequence
  Description of Artificial Sequence:  Enzymatic Nucleic acid
  misc_feature (31)..(31): n stands for inosine
gcucccaucugaugaggccguuaggccgaanggacagc

SEQ ID NO: 4776 - RNA, 38 nt, Artificial Sequence
  Description of Artificial Sequence:  Enzymatic Nucleic acid
  misc_feature (31)..(31): n stands for inosine
accccagccugaugaggccguuaggccgaancucccau

SEQ ID NO: 4777 - RNA, 38 nt, Artificial Sequence
  Description of Artificial Sequence:  Enzymatic Nucleic acid
  misc_feature (31)..(31): n stands for inosine
ugcacccccugaugaggccguuaggccgaancagcucc

SEQ ID NO: 4778 - RNA, 38 nt, Artificial Sequence
  Description of Artificial Sequence:  Enzymatic Nucleic acid
  misc_feature (31)..(31): n stands for inosine
uccucucccugaugaggccguuaggccgaancacccca

SEQ ID NO: 4779 - RNA, 38 nt, Artificial Sequence
  Description of Artificial Sequence:  Enzymatic Nucleic acid
  misc_feature (31)..(31): n stands for inosine
uuucuggccugaugaggccguuaggccgaanuucuccu

SEQ ID NO: 4780 - RNA, 38 nt, Artificial Sequence
  Description of Artificial Sequence:  Enzymatic Nucleic acid
  misc_feature (31)..(31): n stands for inosine
caguuucucugaugaggccguuaggccgaancaguucu

SEQ ID NO: 4781 - RNA, 38 nt, Artificial Sequence
  Description of Artificial Sequence:  Enzymatic Nucleic acid
  misc_feature (31)..(31): n stands for inosine
ucaguuuccugaugaggccguuaggccgaangcaguuc

SEQ ID NO: 4782 - RNA, 38 nt, Artificial Sequence
  Description of Artificial Sequence:  Enzymatic Nucleic acid
  misc_feature (31)..(31): n stands for inosine
uuuugguccugaugaggccguuaggccgaanuuucugg

SEQ ID NO: 4783 - RNA, 38 nt, Artificial Sequence
  Description of Artificial Sequence:  Enzymatic Nucleic acid
  misc_feature (31)..(31): n stands for inosine
augauuuucugaugaggccguuaggccgaanucaguuu

SEQ ID NO: 4784 - RNA, 38 nt, Artificial Sequence
  Description of Artificial Sequence:  Enzymatic Nucleic acid
  misc_feature (31)..(31): n stands for inosine
gaugauuucugaugaggccguuaggccgaangucaguu

SEQ ID NO: 4785 - RNA, 38 nt, Artificial Sequence
  Description of Artificial Sequence:  Enzymatic Nucleic acid
  misc_feature (31)..(31): n stands for inosine
ggcacagacugaugaggccguuaggccgaanauuuugg

SEQ ID NO: 4786 - RNA, 38 nt, Artificial Sequence
  Description of Artificial Sequence:  Enzymatic Nucleic acid
  misc_feature (31)..(31): n stands for inosine
cugggcaccugaugaggccguuaggccgaanaugauuu

SEQ ID NO: 4787 - RNA, 38 nt, Artificial Sequence
  Description of Artificial Sequence:  Enzymatic Nucleic acid
  misc_feature (31)..(31): n stands for inosine
cacugcugcugaugaggccguuaggccgaancacagau

SEQ ID NO: 4788 - RNA, 38 nt, Artificial Sequence
  Description of Artificial Sequence:  Enzymatic Nucleic acid
  misc_feature (31)..(31): n stands for inosine
gcacugcucugaugaggccguuaggccgaangcacaga

SEQ ID NO: 4789 - RNA, 38 nt, Artificial Sequence
  Description of Artificial Sequence:  Enzymatic Nucleic acid
  misc_feature (31)..(31): n stands for inosine
agcacugccugaugaggccguuaggccgaanggcacag

SEQ ID NO: 4790 - RNA, 38 nt, Artificial Sequence
  Description of Artificial Sequence:  Enzymatic Nucleic acid
  misc_feature (31)..(31): n stands for inosine
cggagcaccugaugaggccguuaggccgaancugggca

SEQ ID NO: 4791 - RNA, 38 nt, Artificial Sequence
  Description of Artificial Sequence:  Enzymatic Nucleic acid
  misc_feature (31)..(31): n stands for inosine
gcgcccggcugaugaggccguuaggccgaancacugcu

SEQ ID NO: 4792 - RNA, 38 nt, Artificial Sequence
  Description of Artificial Sequence:  Enzymatic Nucleic acid
  misc_feature (31)..(31): n stands for inosine
cagcgccccugaugaggccguuaggccgaanagcacug

SEQ ID NO: 4793 - RNA, 38 nt, Artificial Sequence
  Description of Artificial Sequence:  Enzymatic Nucleic acid
  misc_feature (31)..(31): n stands for inosine
gccacggccugaugaggccguuaggccgaancgcccgg

SEQ ID NO: 4794 - RNA, 38 nt, Artificial Sequence
  Description of Artificial Sequence:  Enzymatic Nucleic acid
  misc_feature (31)..(31): n stands for inosine
cuugccaccugaugaggccguuaggccgaancagcgcc

SEQ ID NO: 4795 - RNA, 38 nt, Artificial Sequence
  Description of Artificial Sequence:  Enzymatic Nucleic acid
  misc_feature (31)..(31): n stands for inosine
gggggacucugaugaggccguuaggccgaanccacggc

SEQ ID NO: 4796 - RNA, 38 nt, Artificial Sequence
  Description of Artificial Sequence:  Enzymatic Nucleic acid
  misc_feature (31)..(31): n stands for inosine
ucacugggcugaugaggccguuaggccgaanacuugcc

SEQ ID NO: 4797 - RNA, 38 nt, Artificial Sequence
  Description of Artificial Sequence:  Enzymatic Nucleic acid
  misc_feature (31)..(31): n stands for inosine
gucacuggcugaugaggccguuaggccgaangacuugc

SEQ ID NO: 4798 - RNA, 38 nt, Artificial Sequence
  Description of Artificial Sequence:  Enzymatic Nucleic acid
  misc_feature (31)..(31): n stands for inosine
agucacugcugaugaggccguuaggccgaanggacuug

SEQ ID NO: 4799 - RNA, 38 nt, Artificial Sequence
  Description of Artificial Sequence:  Enzymatic Nucleic acid
  misc_feature (31)..(31): n stands for inosine
cagucacucugaugaggccguuaggccgaangggacuu

SEQ ID NO: 4800 - RNA, 38 nt, Artificial Sequence
  Description of Artificial Sequence:  Enzymatic Nucleic acid
  misc_feature (31)..(31): n stands for inosine
gcagucaccugaugaggccguuaggccgaanggggacu

SEQ ID NO: 4801 - RNA, 38 nt, Artificial Sequence
  Description of Artificial Sequence:  Enzymatic Nucleic acid
  misc_feature (31)..(31): n stands for inosine
guggcagccugaugaggccguuaggccgaanucacugg

SEQ ID NO: 4802 - RNA, 38 nt, Artificial Sequence
  Description of Artificial Sequence:  Enzymatic Nucleic acid
  misc_feature (31)..(31): n stands for inosine
guuguggccugaugaggccguuaggccgaancagucac

SEQ ID NO: 4803 - RNA, 38 nt, Artificial Sequence
  Description of Artificial Sequence:  Enzymatic Nucleic acid
  misc_feature (31)..(31): n stands for inosine
cugguugucugaugaggccguuaggccgaancagcagu

SEQ ID NO: 4804 - RNA, 38 nt, Artificial Sequence
  Description of Artificial Sequence:  Enzymatic Nucleic acid
  misc_feature (31)..(31): n stands for inosine
acugguugcugaugaggccguuaggccgaangcagcag

SEQ ID NO: 4805 - RNA, 38 nt, Artificial Sequence
  Description of Artificial Sequence:  Enzymatic Nucleic acid
  misc_feature (31)..(31): n stands for inosine
acacuggucugaugaggccguuaggccgaanuggcagc

SEQ ID NO: 4806 - RNA, 38 nt, Artificial Sequence
  Description of Artificial Sequence:  Enzymatic Nucleic acid
  misc_feature (31)..(31): n stands for inosine
agcacacucugaugaggccguuaggccgaanuuguggc

SEQ ID NO: 4807 - RNA, 38 nt, Artificial Sequence
  Description of Artificial Sequence:  Enzymatic Nucleic acid
  misc_feature (31)..(31): n stands for inosine
cagcacaccugaugaggccguuaggccgaanguugugg

SEQ ID NO: 4808 - RNA, 38 nt, Artificial Sequence
  Description of Artificial Sequence:  Enzymatic Nucleic acid
  misc_feature (31)..(31): n stands for inosine
cagccugccugaugaggccguuaggccgaancacacug

SEQ ID NO: 4809 - RNA, 38 nt, Artificial Sequence
  Description of Artificial Sequence:  Enzymatic Nucleic acid
  misc_feature (31)..(31): n stands for inosine
gugcagcccugaugaggccguuaggccgaancagcaca

SEQ ID NO: 4810 - RNA, 38 nt, Artificial Sequence
  Description of Artificial Sequence:  Enzymatic Nucleic acid
  misc_feature (31)..(31): n stands for inosine
gccugugccugaugaggccguuaggccgaanccugcag

SEQ ID NO: 4811 - RNA, 38 nt, Artificial Sequence
  Description of Artificial Sequence:  Enzymatic Nucleic acid
  misc_feature (31)..(31): n stands for inosine
ggggccugcugaugaggccguuaggccgaancagccug

SEQ ID NO: 4812 - RNA, 38 nt, Artificial Sequence
  Description of Artificial Sequence:  Enzymatic Nucleic acid
  misc_feature (31)..(31): n stands for inosine
cgggggcccugaugaggccguuaggccgaanugcagcc

SEQ ID NO: 4813 - RNA, 38 nt, Artificial Sequence
  Description of Artificial Sequence:  Enzymatic Nucleic acid
  misc_feature (31)..(31): n stands for inosine
cucccgggcugaugaggccguuaggccgaanccugugc

SEQ ID NO: 4814 - RNA, 38 nt, Artificial Sequence
  Description of Artificial Sequence:  Enzymatic Nucleic acid
  misc_feature (31)..(31): n stands for inosine
ucucccggcugaugaggccguuaggccgaangccugug

SEQ ID NO: 4815 - RNA, 38 nt, Artificial Sequence
  Description of Artificial Sequence:  Enzymatic Nucleic acid
  misc_feature (31)..(31): n stands for inosine
cucucccgcugaugaggccguuaggccgaanggccugu

SEQ ID NO: 4816 - RNA, 38 nt, Artificial Sequence
  Description of Artificial Sequence:  Enzymatic Nucleic acid
  misc_feature (31)..(31): n stands for inosine
gcucuccccugaugaggccguuaggccgaangggccug

SEQ ID NO: 4817 - RNA, 38 nt, Artificial Sequence
  Description of Artificial Sequence:  Enzymatic Nucleic acid
  misc_feature (31)..(31): n stands for inosine
gaccaggccugaugaggccguuaggccgaanucgcucu

SEQ ID NO: 4818 - RNA, 38 nt, Artificial Sequence
  Description of Artificial Sequence:  Enzymatic Nucleic acid
  misc_feature (31)..(31): n stands for inosine
gcagaccacugaugaggccguuaggccgaancagucgc

SEQ ID NO: 4819 - RNA, 38 nt, Artificial Sequence
  Description of Artificial Sequence:  Enzymatic Nucleic acid
  misc_feature (31)..(31): n stands for inosine
ggcagacccugaugaggccguuaggccgaangcagucg

SEQ ID NO: 4820 - RNA, 38 nt, Artificial Sequence
  Description of Artificial Sequence:  Enzymatic Nucleic acid
  misc_feature (31)..(31): n stands for inosine
uuugcggccugaugaggccguuaggccgaanaccaggc

SEQ ID NO: 4821 - RNA, 38 nt, Artificial Sequence
  Description of Artificial Sequence:  Enzymatic Nucleic acid
  misc_feature (31)..(31): n stands for inosine
gaauuugccugaugaggccguuaggccgaancagacca

SEQ ID NO: 4822 - RNA, 38 nt, Artificial Sequence
  Description of Artificial Sequence:  Enzymatic Nucleic acid
  misc_feature (31)..(31): n stands for inosine
ucggaauucugaugaggccguuaggccgaancggcaga

SEQ ID NO: 4823 - RNA, 38 nt, Artificial Sequence
  Description of Artificial Sequence:  Enzymatic Nucleic acid
  misc_feature (31)..(31): n stands for inosine
uucgucuccugaugaggccguuaggccgaanaauuugc

SEQ ID NO: 4824 - RNA, 38 nt, Artificial Sequence
  Description of Artificial Sequence:  Enzymatic Nucleic acid
  misc_feature (31)..(31): n stands for inosine
uugcacgucugaugaggccguuaggccgaancuucguc

SEQ ID NO: 4825 - RNA, 38 nt, Artificial Sequence
  Description of Artificial Sequence:  Enzymatic Nucleic acid
  misc_feature (31)..(31): n stands for inosine
cuugcacgcugaugaggccguuaggccgaangcuucgu

SEQ ID NO: 4826 - RNA, 38 nt, Artificial Sequence
  Description of Artificial Sequence:  Enzymatic Nucleic acid
  misc_feature (31)..(31): n stands for inosine
gguguccucugaugaggccguuaggccgaancacgugg

SEQ ID NO: 4827 - RNA, 38 nt, Artificial Sequence
  Description of Artificial Sequence:  Enzymatic Nucleic acid
  misc_feature (31)..(31): n stands for inosine
ggggcaggcugaugaggccguuaggccgaanuccuugc

SEQ ID NO: 4828 - RNA, 38 nt, Artificial Sequence
  Description of Artificial Sequence:  Enzymatic Nucleic acid
  misc_feature (31)..(31): n stands for inosine
ggggggcacugaugaggccguuaggccgaanuguccuu

SEQ ID NO: 4829 - RNA, 38 nt, Artificial Sequence
  Description of Artificial Sequence:  Enzymatic Nucleic acid
  misc_feature (31)..(31): n stands for inosine
uggggggccugaugaggccguuaggccgaanguguccu

SEQ ID NO: 4830 - RNA, 38 nt, Artificial Sequence
  Description of Artificial Sequence:  Enzymatic Nucleic acid
  misc_feature (31)..(31): n stands for inosine
gaguggggcugaugaggccguuaggccgaancaggugu

SEQ ID NO: 4831 - RNA, 38 nt, Artificial Sequence
  Description of Artificial Sequence:  Enzymatic Nucleic acid
  misc_feature (31)..(31): n stands for inosine
ugagugggcugaugaggccguuaggccgaangcaggug

SEQ ID NO: 4832 - RNA, 38 nt, Artificial Sequence
  Description of Artificial Sequence:  Enzymatic Nucleic acid
  misc_feature (31)..(31): n stands for inosine
augaguggcugaugaggccguuaggccgaanggcaggu

SEQ ID NO: 4833 - RNA, 38 nt, Artificial Sequence
  Description of Artificial Sequence:  Enzymatic Nucleic acid
  misc_feature (31)..(31): n stands for inosine
caugagugcugaugaggccguuaggccgaangggcagg

SEQ ID NO: 4834 - RNA, 38 nt, Artificial Sequence
  Description of Artificial Sequence:  Enzymatic Nucleic acid
  misc_feature (31)..(31): n stands for inosine
gcaugagucugaugaggccguuaggccgaanggggcag

SEQ ID NO: 4835 - RNA, 38 nt, Artificial Sequence
  Description of Artificial Sequence:  Enzymatic Nucleic acid
  misc_feature (31)..(31): n stands for inosine
agcaugagcugaugaggccguuaggccgaangggggca

SEQ ID NO: 4836 - RNA, 38 nt, Artificial Sequence
  Description of Artificial Sequence:  Enzymatic Nucleic acid
  misc_feature (31)..(31): n stands for inosine
agagcaugcugaugaggccguuaggccgaanugggggg

SEQ ID NO: 4837 - RNA, 38 nt, Artificial Sequence
  Description of Artificial Sequence:  Enzymatic Nucleic acid
  misc_feature (31)..(31): n stands for inosine
guagagcacugaugaggccguuaggccgaanagugggg

SEQ ID NO: 4838 - RNA, 38 nt, Artificial Sequence
  Description of Artificial Sequence:  Enzymatic Nucleic acid
  misc_feature (31)..(31): n stands for inosine
gguuguagcugaugaggccguuaggccgaancaugagu

SEQ ID NO: 4839 - RNA, 38 nt, Artificial Sequence
  Description of Artificial Sequence:  Enzymatic Nucleic acid
  misc_feature (31)..(31): n stands for inosine
gggguugucugaugaggccguuaggccgaanagcauga

SEQ ID NO: 4840 - RNA, 38 nt, Artificial Sequence
  Description of Artificial Sequence:  Enzymatic Nucleic acid
  misc_feature (31)..(31): n stands for inosine
gguggggucugaugaggccguuaggccgaanuagagca

SEQ ID NO: 4841 - RNA, 38 nt, Artificial Sequence
  Description of Artificial Sequence:  Enzymatic Nucleic acid
  misc_feature (31)..(31): n stands for inosine
cgugguggcugaugaggccguuaggccgaanuuguaga

SEQ ID NO: 4842 - RNA, 38 nt, Artificial Sequence
  Description of Artificial Sequence:  Enzymatic Nucleic acid
  misc_feature (31)..(31): n stands for inosine
acguggugcugaugaggccguuaggccgaanguuguag

SEQ ID NO: 4843 - RNA, 38 nt, Artificial Sequence
  Description of Artificial Sequence:  Enzymatic Nucleic acid
  misc_feature (31)..(31): n stands for inosine
uacguggucugaugaggccguuaggccgaangguugua

SEQ ID NO: 4844 - RNA, 38 nt, Artificial Sequence
  Description of Artificial Sequence:  Enzymatic Nucleic acid
  misc_feature (31)..(31): n stands for inosine
guacguggcugaugaggccguuaggccgaanggguugu

SEQ ID NO: 4845 - RNA, 38 nt, Artificial Sequence
  Description of Artificial Sequence:  Enzymatic Nucleic acid
  misc_feature (31)..(31): n stands for inosine
ugguacgucugaugaggccguuaggccgaanugggguu

SEQ ID NO: 4846 - RNA, 38 nt, Artificial Sequence
  Description of Artificial Sequence:  Enzymatic Nucleic acid
  misc_feature (31)..(31): n stands for inosine
cugguacgcugaugaggccguuaggccgaanguggggu

SEQ ID NO: 4847 - RNA, 38 nt, Artificial Sequence
  Description of Artificial Sequence:  Enzymatic Nucleic acid
  misc_feature (31)..(31): n stands for inosine
auccaucucugaugaggccguuaggccgaanuacgugg

SEQ ID NO: 4848 - RNA, 38 nt, Artificial Sequence
  Description of Artificial Sequence:  Enzymatic Nucleic acid
  misc_feature (31)..(31): n stands for inosine
cauccauccugaugaggccguuaggccgaanguacgug

SEQ ID NO: 4849 - RNA, 38 nt, Artificial Sequence
  Description of Artificial Sequence:  Enzymatic Nucleic acid
  misc_feature (31)..(31): n stands for inosine
gcccucggcugaugaggccguuaggccgaanuucacau

SEQ ID NO: 4850 - RNA, 38 nt, Artificial Sequence
  Description of Artificial Sequence:  Enzymatic Nucleic acid
  misc_feature (31)..(31): n stands for inosine
ugcccucgcugaugaggccguuaggccgaanguucaca

SEQ ID NO: 4851 - RNA, 38 nt, Artificial Sequence
  Description of Artificial Sequence:  Enzymatic Nucleic acid
  misc_feature (31)..(31): n stands for inosine
uugcccuccugaugaggccguuaggccgaangguucac

SEQ ID NO: 4852 - RNA, 38 nt, Artificial Sequence
  Description of Artificial Sequence:  Enzymatic Nucleic acid
  misc_feature (31)..(31): n stands for inosine
gcuguauucugaugaggccguuaggccgaancccucgg

SEQ ID NO: 4853 - RNA, 38 nt, Artificial Sequence
  Description of Artificial Sequence:  Enzymatic Nucleic acid
  misc_feature (31)..(31): n stands for inosine
accaaagccugaugaggccguuaggccgaanuauuugc

SEQ ID NO: 4854 - RNA, 38 nt, Artificial Sequence
  Description of Artificial Sequence:  Enzymatic Nucleic acid
  misc_feature (31)..(31): n stands for inosine
ggcaccaacugaugaggccguuaggccgaancuguauu

SEQ ID NO: 4855 - RNA, 38 nt, Artificial Sequence
  Description of Artificial Sequence:  Enzymatic Nucleic acid
  misc_feature (31)..(31): n stands for inosine
acgcaggucugaugaggccguuaggccgaancaccaaa

SEQ ID NO: 4856 - RNA, 38 nt, Artificial Sequence
  Description of Artificial Sequence:  Enzymatic Nucleic acid
  misc_feature (31)..(31): n stands for inosine
cacgcaggcugaugaggccguuaggccgaangcaccaa

SEQ ID NO: 4857 - RNA, 38 nt, Artificial Sequence
  Description of Artificial Sequence:  Enzymatic Nucleic acid
  misc_feature (31)..(31): n stands for inosine
uucacgcacugaugaggccguuaggccgaanuggcacc

SEQ ID NO: 4858 - RNA, 38 nt, Artificial Sequence
  Description of Artificial Sequence:  Enzymatic Nucleic acid
  misc_feature (31)..(31): n stands for inosine
cuucacgccugaugaggccguuaggccgaanguggcac

SEQ ID NO: 4859 - RNA, 38 nt, Artificial Sequence
  Description of Artificial Sequence:  Enzymatic Nucleic acid
  misc_feature (31)..(31): n stands for inosine
aauuacggcugaugaggccguuaggccgaanacacuuc

SEQ ID NO: 4860 - RNA, 38 nt, Artificial Sequence
  Description of Artificial Sequence:  Enzymatic Nucleic acid
  misc_feature (31)..(31): n stands for inosine
uaauuacgcugaugaggccguuaggccgaangacacuu

SEQ ID NO: 4861 - RNA, 38 nt, Artificial Sequence
  Description of Artificial Sequence:  Enzymatic Nucleic acid
  misc_feature (31)..(31): n stands for inosine
auaauuaccugaugaggccguuaggccgaanggacacu

SEQ ID NO: 4862 - RNA, 38 nt, Artificial Sequence
  Description of Artificial Sequence:  Enzymatic Nucleic acid
  misc_feature (31)..(31): n stands for inosine
ccgugauccugaugaggccguuaggccgaanucaccac

SEQ ID NO: 4863 - RNA, 38 nt, Artificial Sequence
  Description of Artificial Sequence:  Enzymatic Nucleic acid
  misc_feature (31)..(31): n stands for inosine
acgagccgcugaugaggccguuaggccgaanaucuguc

SEQ ID NO: 4864 - RNA, 38 nt, Artificial Sequence
  Description of Artificial Sequence:  Enzymatic Nucleic acid
  misc_feature (31)..(31): n stands for inosine
gacgcacgcugaugaggccguuaggccgaanccgugau

SEQ ID NO: 4865 - RNA, 38 nt, Artificial Sequence
  Description of Artificial Sequence:  Enzymatic Nucleic acid
  misc_feature (31)..(31): n stands for inosine
acaggcuccugaugaggccguuaggccgaanacgcacg

SEQ ID NO: 4866 - RNA, 38 nt, Artificial Sequence
  Description of Artificial Sequence:  Enzymatic Nucleic acid
  misc_feature (31)..(31): n stands for inosine
gccccacacugaugaggccguuaggccgaancucggac

SEQ ID NO: 4867 - RNA, 38 nt, Artificial Sequence
  Description of Artificial Sequence:  Enzymatic Nucleic acid
  misc_feature (31)..(31): n stands for inosine
ggccccaccugaugaggccguuaggccgaangcucgga

SEQ ID NO: 4868 - RNA, 38 nt, Artificial Sequence
  Description of Artificial Sequence:  Enzymatic Nucleic acid
  misc_feature (31)..(31): n stands for inosine
uagcuguccugaugaggccguuaggccgaanccccaca

SEQ ID NO: 4869 - RNA, 38 nt, Artificial Sequence
  Description of Artificial Sequence:  Enzymatic Nucleic acid
  misc_feature (31)..(31): n stands for inosine
cucauagccugaugaggccguuaggccgaanucggccc

SEQ ID NO: 4870 - RNA, 38 nt, Artificial Sequence
  Description of Artificial Sequence:  Enzymatic Nucleic acid
  misc_feature (31)..(31): n stands for inosine
caucucaucugaugaggccguuaggccgaancugucgg

SEQ ID NO: 4871 - RNA, 38 nt, Artificial Sequence
  Description of Artificial Sequence:  Enzymatic Nucleic acid
  misc_feature (31)..(31): n stands for inosine
acacuugccugaugaggccguuaggccgaanacgccgu

SEQ ID NO: 4872 - RNA, 38 nt, Artificial Sequence
  Description of Artificial Sequence:  Enzymatic Nucleic acid
  misc_feature (31)..(31): n stands for inosine
cuuacacucugaugaggccguuaggccgaancggacgc

SEQ ID NO: 4873 - RNA, 38 nt, Artificial Sequence
  Description of Artificial Sequence:  Enzymatic Nucleic acid
  misc_feature (31)..(31): n stands for inosine
ugcggcaacugaugaggccguuaggccgaancccuucg

SEQ ID NO: 4874 - RNA, 38 nt, Artificial Sequence
  Description of Artificial Sequence:  Enzymatic Nucleic acid
  misc_feature (31)..(31): n stands for inosine
uugcggcacugaugaggccguuaggccgaangcccuuc

SEQ ID NO: 4875 - RNA, 38 nt, Artificial Sequence
  Description of Artificial Sequence:  Enzymatic Nucleic acid
  misc_feature (31)..(31): n stands for inosine
cacuuugccugaugaggccguuaggccgaancaaggcc

SEQ ID NO: 4876 - RNA, 38 nt, Artificial Sequence
  Description of Artificial Sequence:  Enzymatic Nucleic acid
  misc_feature (31)..(31): n stands for inosine
acacacuucugaugaggccguuaggccgaancggcaag

SEQ ID NO: 4877 - RNA, 38 nt, Artificial Sequence
  Description of Artificial Sequence:  Enzymatic Nucleic acid
  misc_feature (31)..(31): n stands for inosine
ggagagugcugaugaggccguuaggccgaanucuuuaa

SEQ ID NO: 4878 - RNA, 38 nt, Artificial Sequence
  Description of Artificial Sequence:  Enzymatic Nucleic acid
  misc_feature (31)..(31): n stands for inosine
auggagagcugaugaggccguuaggccgaanagucuuu

SEQ ID NO: 4879 - RNA, 38 nt, Artificial Sequence
  Description of Artificial Sequence:  Enzymatic Nucleic acid
  misc_feature (31)..(31): n stands for inosine
uuauggagcugaugaggccguuaggccgaanugagucu

SEQ ID NO: 4880 - RNA, 38 nt, Artificial Sequence
  Description of Artificial Sequence:  Enzymatic Nucleic acid
  misc_feature (31)..(31): n stands for inosine
auuuauggcugaugaggccguuaggccgaanagugagu

SEQ ID NO: 4881 - RNA, 38 nt, Artificial Sequence
  Description of Artificial Sequence:  Enzymatic Nucleic acid
  misc_feature (31)..(31): n stands for inosine
gcauuuaucugaugaggccguuaggccgaanagaguga

SEQ ID NO: 4882 - RNA, 38 nt, Artificial Sequence
  Description of Artificial Sequence:  Enzymatic Nucleic acid
  misc_feature (31)..(31): n stands for inosine
agcauuuacugaugaggccguuaggccgaangagagug

SEQ ID NO: 4883 - RNA, 38 nt, Artificial Sequence
  Description of Artificial Sequence:  Enzymatic Nucleic acid
  misc_feature (31)..(31): n stands for inosine
auauucgucugaugaggccguuaggccgaancauuuau

SEQ ID NO: 4884 - RNA, 38 nt, Artificial Sequence
  Description of Artificial Sequence:  Enzymatic Nucleic acid
  misc_feature (31)..(31): n stands for inosine
uuuugaagcugaugaggccguuaggccgaanuuuaaua

SEQ ID NO: 4885 - RNA, 38 nt, Artificial Sequence
  Description of Artificial Sequence:  Enzymatic Nucleic acid
  misc_feature (31)..(31): n stands for inosine
guuuuugacugaugaggccguuaggccgaanuguuuaa

SEQ ID NO: 4886 - RNA, 38 nt, Artificial Sequence
  Description of Artificial Sequence:  Enzymatic Nucleic acid
  misc_feature (31)..(31): n stands for inosine
gcaguuuucugaugaggccguuaggccgaanaaguguu

SEQ ID NO: 4887 - RNA, 38 nt, Artificial Sequence
  Description of Artificial Sequence:  Enzymatic Nucleic acid
  misc_feature (31)..(31): n stands for inosine
ggaggugccugaugaggccguuaggccgaanuuuuuga

SEQ ID NO: 4888 - RNA, 38 nt, Artificial Sequence
  Description of Artificial Sequence:  Enzymatic Nucleic acid
  misc_feature (31)..(31): n stands for inosine
gauggaggcugaugaggccguuaggccgaancaguuuu

SEQ ID NO: 4889 - RNA, 38 nt, Artificial Sequence
  Description of Artificial Sequence:  Enzymatic Nucleic acid
  misc_feature (31)..(31): n stands for inosine
cugauggacugaugaggccguuaggccgaanugcaguu

SEQ ID NO: 4890 - RNA, 38 nt, Artificial Sequence
  Description of Artificial Sequence:  Enzymatic Nucleic acid
  misc_feature (31)..(31): n stands for inosine
acugauggcugaugaggccguuaggccgaangugcagu

SEQ ID NO: 4891 - RNA, 38 nt, Artificial Sequence
  Description of Artificial Sequence:  Enzymatic Nucleic acid
  misc_feature (31)..(31): n stands for inosine
ccacugaucugaugaggccguuaggccgaanaggugca

SEQ ID NO: 4892 - RNA, 38 nt, Artificial Sequence
  Description of Artificial Sequence:  Enzymatic Nucleic acid
  misc_feature (31)..(31): n stands for inosine
gccacugacugaugaggccguuaggccgaangaggugc

SEQ ID NO: 4893 - RNA, 38 nt, Artificial Sequence
  Description of Artificial Sequence:  Enzymatic Nucleic acid
  misc_feature (31)..(31): n stands for inosine
aucgccaccugaugaggccguuaggccgaanauggagg

SEQ ID NO: 4894 - RNA, 38 nt, Artificial Sequence
  Description of Artificial Sequence:  Enzymatic Nucleic acid
  misc_feature (31)..(31): n stands for inosine
ggauguggcugaugaggccguuaggccgaanaucgcca

SEQ ID NO: 4895 - RNA, 38 nt, Artificial Sequence
  Description of Artificial Sequence:  Enzymatic Nucleic acid
  misc_feature (31)..(31): n stands for inosine
caggaugucugaugaggccguuaggccgaanagaucgc

SEQ ID NO: 4896 - RNA, 38 nt, Artificial Sequence
  Description of Artificial Sequence:  Enzymatic Nucleic acid
  misc_feature (31)..(31): n stands for inosine
gcaggaugcugaugaggccguuaggccgaangagaucg

SEQ ID NO: 4897 - RNA, 38 nt, Artificial Sequence
  Description of Artificial Sequence:  Enzymatic Nucleic acid
  misc_feature (31)..(31): n stands for inosine
cggcaggacugaugaggccguuaggccgaanuggagau

SEQ ID NO: 4898 - RNA, 38 nt, Artificial Sequence
  Description of Artificial Sequence:  Enzymatic Nucleic acid
  misc_feature (31)..(31): n stands for inosine
caccggcacugaugaggccguuaggccgaanaugugga

SEQ ID NO: 4899 - RNA, 38 nt, Artificial Sequence
  Description of Artificial Sequence:  Enzymatic Nucleic acid
  misc_feature (31)..(31): n stands for inosine
ccaccggccugaugaggccguuaggccgaangaugugg

SEQ ID NO: 4900 - RNA, 38 nt, Artificial Sequence
  Description of Artificial Sequence:  Enzymatic Nucleic acid
  misc_feature (31)..(31): n stands for inosine
augccacccugaugaggccguuaggccgaancaggaug

SEQ ID NO: 4901 - RNA, 38 nt, Artificial Sequence
  Description of Artificial Sequence:  Enzymatic Nucleic acid
  misc_feature (31)..(31): n stands for inosine
ccccuaaacugaugaggccguuaggccgaanccaccgg

SEQ ID NO: 4902 - RNA, 38 nt, Artificial Sequence
  Description of Artificial Sequence:  Enzymatic Nucleic acid
  misc_feature (31)..(31): n stands for inosine
ugugaaggcugaugaggccguuaggccgaanucacccc

SEQ ID NO: 4903 - RNA, 38 nt, Artificial Sequence
  Description of Artificial Sequence:  Enzymatic Nucleic acid
  misc_feature (31)..(31): n stands for inosine
ugugugaacugaugaggccguuaggccgaanagucacc

SEQ ID NO: 4904 - RNA, 38 nt, Artificial Sequence
  Description of Artificial Sequence:  Enzymatic Nucleic acid
  misc_feature (31)..(31): n stands for inosine
augugugacugaugaggccguuaggccgaangagucac

SEQ ID NO: 4905 - RNA, 38 nt, Artificial Sequence
  Description of Artificial Sequence:  Enzymatic Nucleic acid
  misc_feature (31)..(31): n stands for inosine
aguaugugcugaugaggccguuaggccgaanaaggagu

SEQ ID NO: 4906 - RNA, 38 nt, Artificial Sequence
  Description of Artificial Sequence:  Enzymatic Nucleic acid
  misc_feature (31)..(31): n stands for inosine
ggaguaugcugaugaggccguuaggccgaanugaagga

SEQ ID NO: 4907 - RNA, 38 nt, Artificial Sequence
  Description of Artificial Sequence:  Enzymatic Nucleic acid
  misc_feature (31)..(31): n stands for inosine
gaggaguacugaugaggccguuaggccgaanugugaag

SEQ ID NO: 4908 - RNA, 38 nt, Artificial Sequence
  Description of Artificial Sequence:  Enzymatic Nucleic acid
  misc_feature (31)..(31): n stands for inosine
agaggaggcugaugaggccguuaggccgaanuaugugu

SEQ ID NO: 4909 - RNA, 38 nt, Artificial Sequence
  Description of Artificial Sequence:  Enzymatic Nucleic acid
  misc_feature (31)..(31): n stands for inosine
ccagaggacugaugaggccguuaggccgaanaguaugu

SEQ ID NO: 4910 - RNA, 38 nt, Artificial Sequence
  Description of Artificial Sequence:  Enzymatic Nucleic acid
  misc_feature (31)..(31): n stands for inosine
uccagaggcugaugaggccguuaggccgaangaguaug

SEQ ID NO: 4911 - RNA, 38 nt, Artificial Sequence
  Description of Artificial Sequence:  Enzymatic Nucleic acid
  misc_feature (31)..(31): n stands for inosine
gauccagacugaugaggccguuaggccgaanaggagua

SEQ ID NO: 4912 - RNA, 38 nt, Artificial Sequence
  Description of Artificial Sequence:  Enzymatic Nucleic acid
  misc_feature (31)..(31): n stands for inosine
ggauccagcugaugaggccguuaggccgaangaggagu

SEQ ID NO: 4913 - RNA, 38 nt, Artificial Sequence
  Description of Artificial Sequence:  Enzymatic Nucleic acid
  misc_feature (31)..(31): n stands for inosine
guggaucccugaugaggccguuaggccgaanaggagga

SEQ ID NO: 4914 - RNA, 38 nt, Artificial Sequence
  Description of Artificial Sequence:  Enzymatic Nucleic acid
  misc_feature (31)..(31): n stands for inosine
guuccugucugaugaggccguuaggccgaanauccaga

SEQ ID NO: 4915 - RNA, 38 nt, Artificial Sequence
  Description of Artificial Sequence:  Enzymatic Nucleic acid
  misc_feature (31)..(31): n stands for inosine
aguuccugcugaugaggccguuaggccgaangauccag

SEQ ID NO: 4916 - RNA, 38 nt, Artificial Sequence
  Description of Artificial Sequence:  Enzymatic Nucleic acid
  misc_feature (31)..(31): n stands for inosine
ccaguucccugaugaggccguuaggccgaanuggaucc

SEQ ID NO: 4917 - RNA, 38 nt, Artificial Sequence
  Description of Artificial Sequence:  Enzymatic Nucleic acid
  misc_feature (31)..(31): n stands for inosine
gaauaucccugaugaggccguuaggccgaanuuccugu

SEQ ID NO: 4918 - RNA, 38 nt, Artificial Sequence
  Description of Artificial Sequence:  Enzymatic Nucleic acid
  misc_feature (31)..(31): n stands for inosine
cgguuuuccugaugaggccguuaggccgaanaauaucc

SEQ ID NO: 4919 - RNA, 38 nt, Artificial Sequence
  Description of Artificial Sequence:  Enzymatic Nucleic acid
  misc_feature (31)..(31): n stands for inosine
uccuuuaccugaugaggccguuaggccgaanuuuucag

SEQ ID NO: 4920 - RNA, 38 nt, Artificial Sequence
  Description of Artificial Sequence:  Enzymatic Nucleic acid
  misc_feature (31)..(31): n stands for inosine
aaacccugcugaugaggccguuaggccgaanauuuccu

SEQ ID NO: 4921 - RNA, 38 nt, Artificial Sequence
  Description of Artificial Sequence:  Enzymatic Nucleic acid
  misc_feature (31)..(31): n stands for inosine
aaaaaccccugaugaggccguuaggccgaanugauuuc

SEQ ID NO: 4922 - RNA, 38 nt, Artificial Sequence
  Description of Artificial Sequence:  Enzymatic Nucleic acid
  misc_feature (31)..(31): n stands for inosine
ccugaauccugaugaggccguuaggccgaancaaaaac

SEQ ID NO: 4923 - RNA, 38 nt, Artificial Sequence
  Description of Artificial Sequence:  Enzymatic Nucleic acid
  misc_feature (31)..(31): n stands for inosine
gccaagcccugaugaggccguuaggccgaanaaucagc

SEQ ID NO: 4924 - RNA, 38 nt, Artificial Sequence
  Description of Artificial Sequence:  Enzymatic Nucleic acid
  misc_feature (31)..(31): n stands for inosine
ucaggccacugaugaggccguuaggccgaanccugaau

SEQ ID NO: 4925 - RNA, 38 nt, Artificial Sequence
  Description of Artificial Sequence:  Enzymatic Nucleic acid
  misc_feature (31)..(31): n stands for inosine
uguuuucacugaugaggccguuaggccgaanccaagcc

SEQ ID NO: 4926 - RNA, 38 nt, Artificial Sequence
  Description of Artificial Sequence:  Enzymatic Nucleic acid
  misc_feature (31)..(31): n stands for inosine
cuguuuuccugaugaggccguuaggccgaangccaagc

SEQ ID NO: 4927 - RNA, 38 nt, Artificial Sequence
  Description of Artificial Sequence:  Enzymatic Nucleic acid
  misc_feature (31)..(31): n stands for inosine
guccgucccugaugaggccguuaggccgaanuuuucag

SEQ ID NO: 4928 - RNA, 38 nt, Artificial Sequence
  Description of Artificial Sequence:  Enzymatic Nucleic acid
  misc_feature (31)..(31): n stands for inosine
ggcauggacugaugaggccguuaggccgaanuccgucc

SEQ ID NO: 4929 - RNA, 38 nt, Artificial Sequence
  Description of Artificial Sequence:  Enzymatic Nucleic acid
  misc_feature (31)..(31): n stands for inosine
aggcauggcugaugaggccguuaggccgaanguccguc

SEQ ID NO: 4930 - RNA, 38 nt, Artificial Sequence
  Description of Artificial Sequence:  Enzymatic Nucleic acid
  misc_feature (31)..(31): n stands for inosine
aaaggcaucugaugaggccguuaggccgaanagguccg

SEQ ID NO: 4931 - RNA, 38 nt, Artificial Sequence
  Description of Artificial Sequence:  Enzymatic Nucleic acid
  misc_feature (31)..(31): n stands for inosine
caaaggcacugaugaggccguuaggccgaangaggucc

SEQ ID NO: 4932 - RNA, 38 nt, Artificial Sequence
  Description of Artificial Sequence:  Enzymatic Nucleic acid
  misc_feature (31)..(31): n stands for inosine
uucucaaacugaugaggccguuaggccgaancauggag

SEQ ID NO: 4933 - RNA, 38 nt, Artificial Sequence
  Description of Artificial Sequence:  Enzymatic Nucleic acid
  misc_feature (31)..(31): n stands for inosine
guucucaacugaugaggccguuaggccgaangcaugga

SEQ ID NO: 4934 - RNA, 38 nt, Artificial Sequence
  Description of Artificial Sequence:  Enzymatic Nucleic acid
  misc_feature (31)..(31): n stands for inosine
gauuucuacugaugaggccguuaggccgaanuucucaa

SEQ ID NO: 4935 - RNA, 38 nt, Artificial Sequence
  Description of Artificial Sequence:  Enzymatic Nucleic acid
  misc_feature (31)..(31): n stands for inosine
ugauuucucugaugaggccguuaggccgaanguucuca

SEQ ID NO: 4936 - RNA, 38 nt, Artificial Sequence
  Description of Artificial Sequence:  Enzymatic Nucleic acid
  misc_feature (31)..(31): n stands for inosine
gccgcguacugaugaggccguuaggccgaanauuucua

SEQ ID NO: 4937 - RNA, 38 nt, Artificial Sequence
  Description of Artificial Sequence:  Enzymatic Nucleic acid
  misc_feature (31)..(31): n stands for inosine
cuuggucccugaugaggccguuaggccgaanccgcgua

SEQ ID NO: 4938 - RNA, 38 nt, Artificial Sequence
  Description of Artificial Sequence:  Enzymatic Nucleic acid
  misc_feature (31)..(31): n stands for inosine
uguugcuucugaugaggccguuaggccgaanuccugcc

SEQ ID NO: 4939 - RNA, 38 nt, Artificial Sequence
  Description of Artificial Sequence:  Enzymatic Nucleic acid
  misc_feature (31)..(31): n stands for inosine
auguugcucugaugaggccguuaggccgaanguccugc

SEQ ID NO: 4940 - RNA, 38 nt, Artificial Sequence
  Description of Artificial Sequence:  Enzymatic Nucleic acid
  misc_feature (31)..(31): n stands for inosine
gaccaugucugaugaggccguuaggccgaancuugguc

SEQ ID NO: 4941 - RNA, 38 nt, Artificial Sequence
  Description of Artificial Sequence:  Enzymatic Nucleic acid
  misc_feature (31)..(31): n stands for inosine
acugaccacugaugaggccguuaggccgaanuugcuug

SEQ ID NO: 4942 - RNA, 38 nt, Artificial Sequence
  Description of Artificial Sequence:  Enzymatic Nucleic acid
  misc_feature (31)..(31): n stands for inosine
gagaaaaccugaugaggccguuaggccgaanaccaugu

SEQ ID NO: 4943 - RNA, 38 nt, Artificial Sequence
  Description of Artificial Sequence:  Enzymatic Nucleic acid
  misc_feature (31)..(31): n stands for inosine
acugcaagcugaugaggccguuaggccgaanaaaacug

SEQ ID NO: 4944 - RNA, 38 nt, Artificial Sequence
  Description of Artificial Sequence:  Enzymatic Nucleic acid
  misc_feature (31)..(31): n stands for inosine
cgacugcacugaugaggccguuaggccgaanagaaaac

SEQ ID NO: 4945 - RNA, 38 nt, Artificial Sequence
  Description of Artificial Sequence:  Enzymatic Nucleic acid
  misc_feature (31)..(31): n stands for inosine
cugacgaccugaugaggccguuaggccgaancaagaga

SEQ ID NO: 4946 - RNA, 38 nt, Artificial Sequence
  Description of Artificial Sequence:  Enzymatic Nucleic acid
  misc_feature (31)..(31): n stands for inosine
guucaggccugaugaggccguuaggccgaanacgacug

SEQ ID NO: 4947 - RNA, 38 nt, Artificial Sequence
  Description of Artificial Sequence:  Enzymatic Nucleic acid
  misc_feature (31)..(31): n stands for inosine
uauguucacugaugaggccguuaggccgaancugacga

SEQ ID NO: 4948 - RNA, 38 nt, Artificial Sequence
  Description of Artificial Sequence:  Enzymatic Nucleic acid
  misc_feature (31)..(31): n stands for inosine
uuauguuccugaugaggccguuaggccgaangcugacg

SEQ ID NO: 4949 - RNA, 38 nt, Artificial Sequence
  Description of Artificial Sequence:  Enzymatic Nucleic acid
  misc_feature (31)..(31): n stands for inosine
ggauguuacugaugaggccguuaggccgaanuucaggc

SEQ ID NO: 4950 - RNA, 38 nt, Artificial Sequence
  Description of Artificial Sequence:  Enzymatic Nucleic acid
  misc_feature (31)..(31): n stands for inosine
cccaaggacugaugaggccguuaggccgaanuuauguu

SEQ ID NO: 4951 - RNA, 38 nt, Artificial Sequence
  Description of Artificial Sequence:  Enzymatic Nucleic acid
  misc_feature (31)..(31): n stands for inosine
aaucccaacugaugaggccguuaggccgaanauguuau

SEQ ID NO: 4952 - RNA, 38 nt, Artificial Sequence
  Description of Artificial Sequence:  Enzymatic Nucleic acid
  misc_feature (31)..(31): n stands for inosine
uaaucccacugaugaggccguuaggccgaangauguua

SEQ ID NO: 4953 - RNA, 38 nt, Artificial Sequence
  Description of Artificial Sequence:  Enzymatic Nucleic acid
  misc_feature (31)..(31): n stands for inosine
cuugagggcugaugaggccguuaggccgaancguaauc

SEQ ID NO: 4954 - RNA, 38 nt, Artificial Sequence
  Description of Artificial Sequence:  Enzymatic Nucleic acid
  misc_feature (31)..(31): n stands for inosine
uccuugagcugaugaggccguuaggccgaanagcguaa

SEQ ID NO: 4955 - RNA, 38 nt, Artificial Sequence
  Description of Artificial Sequence:  Enzymatic Nucleic acid
  misc_feature (31)..(31): n stands for inosine
cuccuugacugaugaggccguuaggccgaangagcgua

SEQ ID NO: 4956 - RNA, 38 nt, Artificial Sequence
  Description of Artificial Sequence:  Enzymatic Nucleic acid
  misc_feature (31)..(31): n stands for inosine
ucuccuugcugaugaggccguuaggccgaanggagcgu

SEQ ID NO: 4957 - RNA, 38 nt, Artificial Sequence
  Description of Artificial Sequence:  Enzymatic Nucleic acid
  misc_feature (31)..(31): n stands for inosine
uaucuccucugaugaggccguuaggccgaanagggagc

SEQ ID NO: 4958 - RNA, 38 nt, Artificial Sequence
  Description of Artificial Sequence:  Enzymatic Nucleic acid
  misc_feature (31)..(31): n stands for inosine
uuguuucccugaugaggccguuaggccgaanaaauuau

SEQ ID NO: 4959 - RNA, 38 nt, Artificial Sequence
  Description of Artificial Sequence:  Enzymatic Nucleic acid
  misc_feature (31)..(31): n stands for inosine
caaauuuucugaugaggccguuaggccgaanuuuccug

SEQ ID NO: 4960 - RNA, 38 nt, Artificial Sequence
  Description of Artificial Sequence:  Enzymatic Nucleic acid
  misc_feature (31)..(31): n stands for inosine
auuugcaucugaugaggccguuaggccgaancacaaau

SEQ ID NO: 4961 - RNA, 38 nt, Artificial Sequence
  Description of Artificial Sequence:  Enzymatic Nucleic acid
  misc_feature (31)..(31): n stands for inosine
auuguauucugaugaggccguuaggccgaancauagca

SEQ ID NO: 4962 - RNA, 38 nt, Artificial Sequence
  Description of Artificial Sequence:  Enzymatic Nucleic acid
  misc_feature (31)..(31): n stands for inosine
caguuuaucugaugaggccguuaggccgaanuauuugc

SEQ ID NO: 4963 - RNA, 38 nt, Artificial Sequence
  Description of Artificial Sequence:  Enzymatic Nucleic acid
  misc_feature (31)..(31): n stands for inosine
uuuuuucccugaugaggccguuaggccgaanuuuauug

SEQ ID NO: 4964 - RNA, 38 nt, Artificial Sequence
  Description of Artificial Sequence:  Enzymatic Nucleic acid
  misc_feature (31)..(31): n stands for inosine
ucccaaaccugaugaggccguuaggccgaanuuuuuuc

SEQ ID NO: 4965 - RNA, 38 nt, Artificial Sequence
  Description of Artificial Sequence:  Enzymatic Nucleic acid
  misc_feature (31)..(31): n stands for inosine
ugaccggacugaugaggccguuaggccgaanucccaaa

SEQ ID NO: 4966 - RNA, 38 nt, Artificial Sequence
  Description of Artificial Sequence:  Enzymatic Nucleic acid
  misc_feature (31)..(31): n stands for inosine
cugaccggcugaugaggccguuaggccgaangucccaa

SEQ ID NO: 4967 - RNA, 38 nt, Artificial Sequence
  Description of Artificial Sequence:  Enzymatic Nucleic acid
  misc_feature (31)..(31): n stands for inosine
uucugacccugaugaggccguuaggccgaanagguccc

SEQ ID NO: 4968 - RNA, 38 nt, Artificial Sequence
  Description of Artificial Sequence:  Enzymatic Nucleic acid
  misc_feature (31)..(31): n stands for inosine
ugguuuuccugaugaggccguuaggccgaanaccggag

SEQ ID NO: 4969 - RNA, 38 nt, Artificial Sequence
  Description of Artificial Sequence:  Enzymatic Nucleic acid
  misc_feature (31)..(31): n stands for inosine
auaauuuucugaugaggccguuaggccgaanuuuucug

SEQ ID NO: 4970 - RNA, 38 nt, Artificial Sequence
  Description of Artificial Sequence:  Enzymatic Nucleic acid
  misc_feature (31)..(31): n stands for inosine
uauaauuucugaugaggccguuaggccgaanguuuucu

SEQ ID NO: 4971 - RNA, 38 nt, Artificial Sequence
  Description of Artificial Sequence:  Enzymatic Nucleic acid
  misc_feature (31)..(31): n stands for inosine
accucugucugaugaggccguuaggccgaancuuauaa

SEQ ID NO: 4972 - RNA, 38 nt, Artificial Sequence
  Description of Artificial Sequence:  Enzymatic Nucleic acid
  misc_feature (31)..(31): n stands for inosine
uucaccuccugaugaggccguuaggccgaanuugcuua

SEQ ID NO: 4973 - RNA, 38 nt, Artificial Sequence
  Description of Artificial Sequence:  Enzymatic Nucleic acid
  misc_feature (31)..(31): n stands for inosine
cuugcagccugaugaggccguuaggccgaanuuuucac

SEQ ID NO: 4974 - RNA, 38 nt, Artificial Sequence
  Description of Artificial Sequence:  Enzymatic Nucleic acid
  misc_feature (31)..(31): n stands for inosine
ggccuugccugaugaggccguuaggccgaancuguuuu

SEQ ID NO: 4975 - RNA, 38 nt, Artificial Sequence
  Description of Artificial Sequence:  Enzymatic Nucleic acid
  misc_feature (31)..(31): n stands for inosine
uguggccucugaugaggccguuaggccgaancagcugu

SEQ ID NO: 4976 - RNA, 38 nt, Artificial Sequence
  Description of Artificial Sequence:  Enzymatic Nucleic acid
  misc_feature (31)..(31): n stands for inosine
uggccugucugaugaggccguuaggccgaanccuugca

SEQ ID NO: 4977 - RNA, 38 nt, Artificial Sequence
  Description of Artificial Sequence:  Enzymatic Nucleic acid
  misc_feature (31)..(31): n stands for inosine
cuggccugcugaugaggccguuaggccgaangccuugc

SEQ ID NO: 4978 - RNA, 38 nt, Artificial Sequence
  Description of Artificial Sequence:  Enzymatic Nucleic acid
  misc_feature (31)..(31): n stands for inosine
accuggcccugaugaggccguuaggccgaanuggccuu

SEQ ID NO: 4979 - RNA, 38 nt, Artificial Sequence
  Description of Artificial Sequence:  Enzymatic Nucleic acid
  misc_feature (31)..(31): n stands for inosine
gcagaccucugaugaggccguuaggccgaanccugugg

SEQ ID NO: 4980 - RNA, 38 nt, Artificial Sequence
  Description of Artificial Sequence:  Enzymatic Nucleic acid
  misc_feature (31)..(31): n stands for inosine
ggcagacccugaugaggccguuaggccgaangccugug

SEQ ID NO: 4981 - RNA, 38 nt, Artificial Sequence
  Description of Artificial Sequence:  Enzymatic Nucleic acid
  misc_feature (31)..(31): n stands for inosine
ggcauggccugaugaggccguuaggccgaanaccuggc

SEQ ID NO: 4982 - RNA, 38 nt, Artificial Sequence
  Description of Artificial Sequence:  Enzymatic Nucleic acid
  misc_feature (31)..(31): n stands for inosine
caaggcaucugaugaggccguuaggccgaancagaccu

SEQ ID NO: 4983 - RNA, 38 nt, Artificial Sequence
  Description of Artificial Sequence:  Enzymatic Nucleic acid
  misc_feature (31)..(31): n stands for inosine
acaaggcacugaugaggccguuaggccgaangcagacc

SEQ ID NO: 4984 - RNA, 38 nt, Artificial Sequence
  Description of Artificial Sequence:  Enzymatic Nucleic acid
  misc_feature (31)..(31): n stands for inosine
gagcacaacugaugaggccguuaggccgaancauggca

SEQ ID NO: 4985 - RNA, 38 nt, Artificial Sequence
  Description of Artificial Sequence:  Enzymatic Nucleic acid
  misc_feature (31)..(31): n stands for inosine
ggagcacacugaugaggccguuaggccgaangcauggc

SEQ ID NO: 4986 - RNA, 38 nt, Artificial Sequence
  Description of Artificial Sequence:  Enzymatic Nucleic acid
  misc_feature (31)..(31): n stands for inosine
cucgggggcugaugaggccguuaggccgaancacaagg

SEQ ID NO: 4987 - RNA, 38 nt, Artificial Sequence
  Description of Artificial Sequence:  Enzymatic Nucleic acid
  misc_feature (31)..(31): n stands for inosine
cccucgggcugaugaggccguuaggccgaanagcacaa

SEQ ID NO: 4988 - RNA, 38 nt, Artificial Sequence
  Description of Artificial Sequence:  Enzymatic Nucleic acid
  misc_feature (31)..(31): n stands for inosine
gcccucggcugaugaggccguuaggccgaangagcaca

SEQ ID NO: 4989 - RNA, 38 nt, Artificial Sequence
  Description of Artificial Sequence:  Enzymatic Nucleic acid
  misc_feature (31)..(31): n stands for inosine
agcccucgcugaugaggccguuaggccgaanggagcac

SEQ ID NO: 4990 - RNA, 38 nt, Artificial Sequence
  Description of Artificial Sequence:  Enzymatic Nucleic acid
  misc_feature (31)..(31): n stands for inosine
cagcccuccugaugaggccguuaggccgaangggagca

SEQ ID NO: 4991 - RNA, 38 nt, Artificial Sequence
  Description of Artificial Sequence:  Enzymatic Nucleic acid
  misc_feature (31)..(31): n stands for inosine
gccccagccugaugaggccguuaggccgaancccucgg

SEQ ID NO: 4992 - RNA, 38 nt, Artificial Sequence
  Description of Artificial Sequence:  Enzymatic Nucleic acid
  misc_feature (31)..(31): n stands for inosine
cgggcccccugaugaggccguuaggccgaancagcccu

SEQ ID NO: 4993 - RNA, 38 nt, Artificial Sequence
  Description of Artificial Sequence:  Enzymatic Nucleic acid
  misc_feature (31)..(31): n stands for inosine
gggcuccgcugaugaggccguuaggccgaanccccagc

SEQ ID NO: 4994 - RNA, 38 nt, Artificial Sequence
  Description of Artificial Sequence:  Enzymatic Nucleic acid
  misc_feature (31)..(31): n stands for inosine
ugggcucccugaugaggccguuaggccgaangccccag

SEQ ID NO: 4995 - RNA, 38 nt, Artificial Sequence
  Description of Artificial Sequence:  Enzymatic Nucleic acid
  misc_feature (31)..(31): n stands for inosine
agucccugcugaugaggccguuaggccgaancuccggg

SEQ ID NO: 4996 - RNA, 38 nt, Artificial Sequence
  Description of Artificial Sequence:  Enzymatic Nucleic acid
  misc_feature (31)..(31): n stands for inosine
cagucccucugaugaggccguuaggccgaangcuccgg

SEQ ID NO: 4997 - RNA, 38 nt, Artificial Sequence
  Description of Artificial Sequence:  Enzymatic Nucleic acid
  misc_feature (31)..(31): n stands for inosine
gcaguccccugaugaggccguuaggccgaanggcuccg

SEQ ID NO: 4998 - RNA, 38 nt, Artificial Sequence
  Description of Artificial Sequence:  Enzymatic Nucleic acid
  misc_feature (31)..(31): n stands for inosine
agagacgccugaugaggccguuaggccgaanucccugg

SEQ ID NO: 4999 - RNA, 38 nt, Artificial Sequence
  Description of Artificial Sequence:  Enzymatic Nucleic acid
  misc_feature (31)..(31): n stands for inosine
ccggcaagcugaugaggccguuaggccgaanacgcagu

SEQ ID NO: 5000 - RNA, 38 nt, Artificial Sequence
  Description of Artificial Sequence:  Enzymatic Nucleic acid
  misc_feature (31)..(31): n stands for inosine
uuccggcacugaugaggccguuaggccgaanagacgca

SEQ ID NO: 5001 - RNA, 38 nt, Artificial Sequence
  Description of Artificial Sequence:  Enzymatic Nucleic acid
  misc_feature (31)..(31): n stands for inosine
gacauucccugaugaggccguuaggccgaancaagaga

SEQ ID NO: 5002 - RNA, 38 nt, Artificial Sequence
  Description of Artificial Sequence:  Enzymatic Nucleic acid
  misc_feature (31)..(31): n stands for inosine
gccucggccugaugaggccguuaggccgaanacauucc

SEQ ID NO: 5003 - RNA, 38 nt, Artificial Sequence
  Description of Artificial Sequence:  Enzymatic Nucleic acid
  misc_feature (31)..(31): n stands for inosine
ccugccuccugaugaggccguuaggccgaancugacau

SEQ ID NO: 5004 - RNA, 38 nt, Artificial Sequence
  Description of Artificial Sequence:  Enzymatic Nucleic acid
  misc_feature (31)..(31): n stands for inosine
gcauuccccugaugaggccguuaggccgaanccucggc

SEQ ID NO: 5005 - RNA, 38 nt, Artificial Sequence
  Description of Artificial Sequence:  Enzymatic Nucleic acid
  misc_feature (31)..(31): n stands for inosine
cuugcacucugaugaggccguuaggccgaanuccacgc

SEQ ID NO: 5006 - RNA, 38 nt, Artificial Sequence
  Description of Artificial Sequence:  Enzymatic Nucleic acid
  misc_feature (31)..(31): n stands for inosine
cagaagcucugaugaggccguuaggccgaancacuugu

SEQ ID NO: 5007 - RNA, 38 nt, Artificial Sequence
  Description of Artificial Sequence:  Enzymatic Nucleic acid
  misc_feature (31)..(31): n stands for inosine
ccuccagacugaugaggccguuaggccgaancuugcac

SEQ ID NO: 5008 - RNA, 38 nt, Artificial Sequence
  Description of Artificial Sequence:  Enzymatic Nucleic acid
  misc_feature (31)..(31): n stands for inosine
cacccucccugaugaggccguuaggccgaanaagcuug

SEQ ID NO: 5009 - RNA, 38 nt, Artificial Sequence
  Description of Artificial Sequence:  Enzymatic Nucleic acid
  misc_feature (31)..(31): n stands for inosine
acucccuucugaugaggccguuaggccgaancucaccc

SEQ ID NO: 5010 - RNA, 38 nt, Artificial Sequence
  Description of Artificial Sequence:  Enzymatic Nucleic acid
  misc_feature (31)..(31): n stands for inosine
aacucccucugaugaggccguuaggccgaangcucacc

SEQ ID NO: 5011 - RNA, 38 nt, Artificial Sequence
  Description of Artificial Sequence:  Enzymatic Nucleic acid
  misc_feature (31)..(31): n stands for inosine
gcacucagcugaugaggccguuaggccgaanuucucca

SEQ ID NO: 5012 - RNA, 38 nt, Artificial Sequence
  Description of Artificial Sequence:  Enzymatic Nucleic acid
  misc_feature (31)..(31): n stands for inosine
augcacuccugaugaggccguuaggccgaanaguucuc

SEQ ID NO: 5013 - RNA, 38 nt, Artificial Sequence
  Description of Artificial Sequence:  Enzymatic Nucleic acid
  misc_feature (31)..(31): n stands for inosine
gcacuguacugaugaggccguuaggccgaancacucag

SEQ ID NO: 5014 - RNA, 38 nt, Artificial Sequence
  Description of Artificial Sequence:  Enzymatic Nucleic acid
  misc_feature (31)..(31): n stands for inosine
gguggcaccugaugaggccguuaggccgaanuaugcac

SEQ ID NO: 5015 - RNA, 38 nt, Artificial Sequence
  Description of Artificial Sequence:  Enzymatic Nucleic acid
  misc_feature (31)..(31): n stands for inosine
cucugggucugaugaggccguuaggccgaancacugua

SEQ ID NO: 5016 - RNA, 38 nt, Artificial Sequence
  Description of Artificial Sequence:  Enzymatic Nucleic acid
  misc_feature (31)..(31): n stands for inosine
acucugggcugaugaggccguuaggccgaangcacugu

SEQ ID NO: 5017 - RNA, 38 nt, Artificial Sequence
  Description of Artificial Sequence:  Enzymatic Nucleic acid
  misc_feature (31)..(31): n stands for inosine
gcacucugcugaugaggccguuaggccgaanuggcacu

SEQ ID NO: 5018 - RNA, 38 nt, Artificial Sequence
  Description of Artificial Sequence:  Enzymatic Nucleic acid
  misc_feature (31)..(31): n stands for inosine
ggcacucucugaugaggccguuaggccgaanguggcac

SEQ ID NO: 5019 - RNA, 38 nt, Artificial Sequence
  Description of Artificial Sequence:  Enzymatic Nucleic acid
  misc_feature (31)..(31): n stands for inosine
aggcacuccugaugaggccguuaggccgaangguggca

SEQ ID NO: 5020 - RNA, 38 nt, Artificial Sequence
  Description of Artificial Sequence:  Enzymatic Nucleic acid
  misc_feature (31)..(31): n stands for inosine
cugaggcacugaugaggccguuaggccgaancacucug

SEQ ID NO: 5021 - RNA, 38 nt, Artificial Sequence
  Description of Artificial Sequence:  Enzymatic Nucleic acid
  misc_feature (31)..(31): n stands for inosine
ccugaggccugaugaggccguuaggccgaangcacucu

SEQ ID NO: 5022 - RNA, 38 nt, Artificial Sequence
  Description of Artificial Sequence:  Enzymatic Nucleic acid
  misc_feature (31)..(31): n stands for inosine
uggccugacugaugaggccguuaggccgaancaggcac

SEQ ID NO: 5023 - RNA, 38 nt, Artificial Sequence
  Description of Artificial Sequence:  Enzymatic Nucleic acid
  misc_feature (31)..(31): n stands for inosine
auggccugcugaugaggccguuaggccgaangcaggca

SEQ ID NO: 5024 - RNA, 38 nt, Artificial Sequence
  Description of Artificial Sequence:  Enzymatic Nucleic acid
  misc_feature (31)..(31): n stands for inosine
ucauggcccugaugaggccguuaggccgaanaggcagg

SEQ ID NO: 5025 - RNA, 38 nt, Artificial Sequence
  Description of Artificial Sequence:  Enzymatic Nucleic acid
  misc_feature (31)..(31): n stands for inosine
auguucaucugaugaggccguuaggccgaanccugagg

SEQ ID NO: 5026 - RNA, 38 nt, Artificial Sequence
  Description of Artificial Sequence:  Enzymatic Nucleic acid
  misc_feature (31)..(31): n stands for inosine
gauguucacugaugaggccguuaggccgaangccugag

SEQ ID NO: 5027 - RNA, 38 nt, Artificial Sequence
  Description of Artificial Sequence:  Enzymatic Nucleic acid
  misc_feature (31)..(31): n stands for inosine
gcaggugacugaugaggccguuaggccgaanuucaugg

SEQ ID NO: 5028 - RNA, 38 nt, Artificial Sequence
  Description of Artificial Sequence:  Enzymatic Nucleic acid
  misc_feature (31)..(31): n stands for inosine
ugugcaggcugaugaggccguuaggccgaanauguuca

SEQ ID NO: 5029 - RNA, 38 nt, Artificial Sequence
  Description of Artificial Sequence:  Enzymatic Nucleic acid
  misc_feature (31)..(31): n stands for inosine
ccugugcacugaugaggccguuaggccgaanugauguu

SEQ ID NO: 5030 - RNA, 38 nt, Artificial Sequence
  Description of Artificial Sequence:  Enzymatic Nucleic acid
  misc_feature (31)..(31): n stands for inosine
uccugugccugaugaggccguuaggccgaangugaugu

SEQ ID NO: 5031 - RNA, 38 nt, Artificial Sequence
  Description of Artificial Sequence:  Enzymatic Nucleic acid
  misc_feature (31)..(31): n stands for inosine
ccguccugcugaugaggccguuaggccgaancagguga

SEQ ID NO: 5032 - RNA, 38 nt, Artificial Sequence
  Description of Artificial Sequence:  Enzymatic Nucleic acid
  misc_feature (31)..(31): n stands for inosine
ccccgucccugaugaggccguuaggccgaanugcaggu

SEQ ID NO: 5033 - RNA, 38 nt, Artificial Sequence
  Description of Artificial Sequence:  Enzymatic Nucleic acid
  misc_feature (31)..(31): n stands for inosine
aguugucucugaugaggccguuaggccgaanuccccgu

SEQ ID NO: 5034 - RNA, 38 nt, Artificial Sequence
  Description of Artificial Sequence:  Enzymatic Nucleic acid
  misc_feature (31)..(31): n stands for inosine
caguuguccugaugaggccguuaggccgaanguccccg

SEQ ID NO: 5035 - RNA, 38 nt, Artificial Sequence
  Description of Artificial Sequence:  Enzymatic Nucleic acid
  misc_feature (31)..(31): n stands for inosine
gauacagucugaugaggccguuaggccgaanucugguc

SEQ ID NO: 5036 - RNA, 38 nt, Artificial Sequence
  Description of Artificial Sequence:  Enzymatic Nucleic acid
  misc_feature (31)..(31): n stands for inosine
cuggauaccugaugaggccguuaggccgaanuugucug

SEQ ID NO: 5037 - RNA, 38 nt, Artificial Sequence
  Description of Artificial Sequence:  Enzymatic Nucleic acid
  misc_feature (31)..(31): n stands for inosine
ggcacacucugaugaggccguuaggccgaanauacagu

SEQ ID NO: 5038 - RNA, 38 nt, Artificial Sequence
  Description of Artificial Sequence:  Enzymatic Nucleic acid
  misc_feature (31)..(31): n stands for inosine
gggcacaccugaugaggccguuaggccgaangauacag

SEQ ID NO: 5039 - RNA, 38 nt, Artificial Sequence
  Description of Artificial Sequence:  Enzymatic Nucleic acid
  misc_feature (31)..(31): n stands for inosine
auguagugcugaugaggccguuaggccgaancacacug

SEQ ID NO: 5040 - RNA, 38 nt, Artificial Sequence
  Description of Artificial Sequence:  Enzymatic Nucleic acid
  misc_feature (31)..(31): n stands for inosine
aauguagucugaugaggccguuaggccgaangcacacu

SEQ ID NO: 5041 - RNA, 38 nt, Artificial Sequence
  Description of Artificial Sequence:  Enzymatic Nucleic acid
  misc_feature (31)..(31): n stands for inosine
caauguagcugaugaggccguuaggccgaanggcacac

SEQ ID NO: 5042 - RNA, 38 nt, Artificial Sequence
  Description of Artificial Sequence:  Enzymatic Nucleic acid
  misc_feature (31)..(31): n stands for inosine
gucaaugucugaugaggccguuaggccgaanugggcac

SEQ ID NO: 5043 - RNA, 38 nt, Artificial Sequence
  Description of Artificial Sequence:  Enzymatic Nucleic acid
  misc_feature (31)..(31): n stands for inosine
gccgucaacugaugaggccguuaggccgaanuaguggg

SEQ ID NO: 5044 - RNA, 38 nt, Artificial Sequence
  Description of Artificial Sequence:  Enzymatic Nucleic acid
  misc_feature (31)..(31): n stands for inosine
gcagugggcugaugaggccguuaggccgaanccgucaa

SEQ ID NO: 5045 - RNA, 38 nt, Artificial Sequence
  Description of Artificial Sequence:  Enzymatic Nucleic acid
  misc_feature (31)..(31): n stands for inosine
cgcaguggcugaugaggccguuaggccgaangccguca

SEQ ID NO: 5046 - RNA, 38 nt, Artificial Sequence
  Description of Artificial Sequence:  Enzymatic Nucleic acid
  misc_feature (31)..(31): n stands for inosine
acgcagugcugaugaggccguuaggccgaanggccguc

SEQ ID NO: 5047 - RNA, 38 nt, Artificial Sequence
  Description of Artificial Sequence:  Enzymatic Nucleic acid
  misc_feature (31)..(31): n stands for inosine
gacgcagucugaugaggccguuaggccgaangggccgu

SEQ ID NO: 5048 - RNA, 38 nt, Artificial Sequence
  Description of Artificial Sequence:  Enzymatic Nucleic acid
  misc_feature (31)..(31): n stands for inosine
ugacgcagcugaugaggccguuaggccgaanggggccg

SEQ ID NO: 5049 - RNA, 38 nt, Artificial Sequence
  Description of Artificial Sequence:  Enzymatic Nucleic acid
  misc_feature (31)..(31): n stands for inosine
cuugacgccugaugaggccguuaggccgaanugggggc

SEQ ID NO: 5050 - RNA, 38 nt, Artificial Sequence
  Description of Artificial Sequence:  Enzymatic Nucleic acid
  misc_feature (31)..(31): n stands for inosine
gcaggucucugaugaggccguuaggccgaanacgcagu

SEQ ID NO: 5051 - RNA, 38 nt, Artificial Sequence
  Description of Artificial Sequence:  Enzymatic Nucleic acid
  misc_feature (31)..(31): n stands for inosine
gccgggcacugaugaggccguuaggccgaanucuugac

SEQ ID NO: 5052 - RNA, 38 nt, Artificial Sequence
  Description of Artificial Sequence:  Enzymatic Nucleic acid
  misc_feature (31)..(31): n stands for inosine
ugccgggccugaugaggccguuaggccgaangucuuga

SEQ ID NO: 5053 - RNA, 38 nt, Artificial Sequence
  Description of Artificial Sequence:  Enzymatic Nucleic acid
  misc_feature (31)..(31): n stands for inosine
uccugccgcugaugaggccguuaggccgaancaggucu

SEQ ID NO: 5054 - RNA, 38 nt, Artificial Sequence
  Description of Artificial Sequence:  Enzymatic Nucleic acid
  misc_feature (31)..(31): n stands for inosine
cuccugcccugaugaggccguuaggccgaangcagguc

SEQ ID NO: 5055 - RNA, 38 nt, Artificial Sequence
  Description of Artificial Sequence:  Enzymatic Nucleic acid
  misc_feature (31)..(31): n stands for inosine
augacucccugaugaggccguuaggccgaanccgggca

SEQ ID NO: 5056 - RNA, 38 nt, Artificial Sequence
  Description of Artificial Sequence:  Enzymatic Nucleic acid
  misc_feature (31)..(31): n stands for inosine
uucucccacugaugaggccguuaggccgaanacuccug

SEQ ID NO: 5057 - RNA, 38 nt, Artificial Sequence
  Description of Artificial Sequence:  Enzymatic Nucleic acid
  misc_feature (31)..(31): n stands for inosine
cagggugucugaugaggccguuaggccgaanuuuucuc

SEQ ID NO: 5058 - RNA, 38 nt, Artificial Sequence
  Description of Artificial Sequence:  Enzymatic Nucleic acid
  misc_feature (31)..(31): n stands for inosine
gaccagggcugaugaggccguuaggccgaanuuguuuu

SEQ ID NO: 5059 - RNA, 38 nt, Artificial Sequence
  Description of Artificial Sequence:  Enzymatic Nucleic acid
  misc_feature (31)..(31): n stands for inosine
cagaccagcugaugaggccguuaggccgaanuguuguu

SEQ ID NO: 5060 - RNA, 38 nt, Artificial Sequence
  Description of Artificial Sequence:  Enzymatic Nucleic acid
  misc_feature (31)..(31): n stands for inosine
ccagaccacugaugaggccguuaggccgaanguguugu

SEQ ID NO: 5061 - RNA, 38 nt, Artificial Sequence
  Description of Artificial Sequence:  Enzymatic Nucleic acid
  misc_feature (31)..(31): n stands for inosine
uccagacccugaugaggccguuaggccgaangguguug

SEQ ID NO: 5062 - RNA, 38 nt, Artificial Sequence
  Description of Artificial Sequence:  Enzymatic Nucleic acid
  misc_feature (31)..(31): n stands for inosine
guacuucccugaugaggccguuaggccgaanaccaggg

SEQ ID NO: 5063 - RNA, 38 nt, Artificial Sequence
  Description of Artificial Sequence:  Enzymatic Nucleic acid
  misc_feature (31)..(31): n stands for inosine
ccggcguccugaugaggccguuaggccgaancguacuu

SEQ ID NO: 5064 - RNA, 38 nt, Artificial Sequence
  Description of Artificial Sequence:  Enzymatic Nucleic acid
  misc_feature (31)..(31): n stands for inosine
acauggcccugaugaggccguuaggccgaancgucugc

SEQ ID NO: 5065 - RNA, 38 nt, Artificial Sequence
  Description of Artificial Sequence:  Enzymatic Nucleic acid
  misc_feature (31)..(31): n stands for inosine
gcacacaucugaugaggccguuaggccgaanccggcgu

SEQ ID NO: 5066 - RNA, 38 nt, Artificial Sequence
  Description of Artificial Sequence:  Enzymatic Nucleic acid
  misc_feature (31)..(31): n stands for inosine
ggcacacacugaugaggccguuaggccgaangccggcg

SEQ ID NO: 5067 - RNA, 38 nt, Artificial Sequence
  Description of Artificial Sequence:  Enzymatic Nucleic acid
  misc_feature (31)..(31): n stands for inosine
gcacaggucugaugaggccguuaggccgaancacacau

SEQ ID NO: 5068 - RNA, 38 nt, Artificial Sequence
  Description of Artificial Sequence:  Enzymatic Nucleic acid
  misc_feature (31)..(31): n stands for inosine
ggcacaggcugaugaggccguuaggccgaangcacaca

SEQ ID NO: 5069 - RNA, 38 nt, Artificial Sequence
  Description of Artificial Sequence:  Enzymatic Nucleic acid
  misc_feature (31)..(31): n stands for inosine
auggcacacugaugaggccguuaggccgaanuggcaca

SEQ ID NO: 5070 - RNA, 38 nt, Artificial Sequence
  Description of Artificial Sequence:  Enzymatic Nucleic acid
  misc_feature (31)..(31): n stands for inosine
gauggcaccugaugaggccguuaggccgaanguggcac

SEQ ID NO: 5071 - RNA, 38 nt, Artificial Sequence
  Description of Artificial Sequence:  Enzymatic Nucleic acid
  misc_feature (31)..(31): n stands for inosine
guuuggaucugaugaggccguuaggccgaancacaggu

SEQ ID NO: 5072 - RNA, 38 nt, Artificial Sequence
  Description of Artificial Sequence:  Enzymatic Nucleic acid
  misc_feature (31)..(31): n stands for inosine
aguuuggacugaugaggccguuaggccgaangcacagg

SEQ ID NO: 5073 - RNA, 38 nt, Artificial Sequence
  Description of Artificial Sequence:  Enzymatic Nucleic acid
  misc_feature (31)..(31): n stands for inosine
ugcaguuucugaugaggccguuaggccgaanauggcac

SEQ ID NO: 5074 - RNA, 38 nt, Artificial Sequence
  Description of Artificial Sequence:  Enzymatic Nucleic acid
  misc_feature (31)..(31): n stands for inosine
gugcaguucugaugaggccguuaggccgaangauggca

SEQ ID NO: 5075 - RNA, 38 nt, Artificial Sequence
  Description of Artificial Sequence:  Enzymatic Nucleic acid
  misc_feature (31)..(31): n stands for inosine
guaggugccugaugaggccguuaggccgaanuuuggau

SEQ ID NO: 5076 - RNA, 38 nt, Artificial Sequence
  Description of Artificial Sequence:  Enzymatic Nucleic acid
  misc_feature (31)..(31): n stands for inosine
uccguaggcugaugaggccguuaggccgaancaguuug

SEQ ID NO: 5077 - RNA, 38 nt, Artificial Sequence
  Description of Artificial Sequence:  Enzymatic Nucleic acid
  misc_feature (31)..(31): n stands for inosine
cauccguacugaugaggccguuaggccgaanugcaguu

SEQ ID NO: 5078 - RNA, 38 nt, Artificial Sequence
  Description of Artificial Sequence:  Enzymatic Nucleic acid
  misc_feature (31)..(31): n stands for inosine
gcauccgucugaugaggccguuaggccgaangugcagu

SEQ ID NO: 5079 - RNA, 38 nt, Artificial Sequence
  Description of Artificial Sequence:  Enzymatic Nucleic acid
  misc_feature (31)..(31): n stands for inosine
uggcccagcugaugaggccguuaggccgaancauccgu

SEQ ID NO: 5080 - RNA, 38 nt, Artificial Sequence
  Description of Artificial Sequence:  Enzymatic Nucleic acid
  misc_feature (31)..(31): n stands for inosine
ccuggccccugaugaggccguuaggccgaanugcaucc

SEQ ID NO: 5081 - RNA, 38 nt, Artificial Sequence
  Description of Artificial Sequence:  Enzymatic Nucleic acid
  misc_feature (31)..(31): n stands for inosine
caagaccucugaugaggccguuaggccgaancccagug

SEQ ID NO: 5082 - RNA, 38 nt, Artificial Sequence
  Description of Artificial Sequence:  Enzymatic Nucleic acid
  misc_feature (31)..(31): n stands for inosine
ucaagacccugaugaggccguuaggccgaangcccagu

SEQ ID NO: 5083 - RNA, 38 nt, Artificial Sequence
  Description of Artificial Sequence:  Enzymatic Nucleic acid
  misc_feature (31)..(31): n stands for inosine
agccuucacugaugaggccguuaggccgaanaccuggc

SEQ ID NO: 5084 - RNA, 38 nt, Artificial Sequence
  Description of Artificial Sequence:  Enzymatic Nucleic acid
  misc_feature (31)..(31): n stands for inosine
cguuggaccugaugaggccguuaggccgaanccuucaa

SEQ ID NO: 5085 - RNA, 38 nt, Artificial Sequence
  Description of Artificial Sequence:  Enzymatic Nucleic acid
  misc_feature (31)..(31): n stands for inosine
cauucguucugaugaggccguuaggccgaanacagccu

SEQ ID NO: 5086 - RNA, 38 nt, Artificial Sequence
  Description of Artificial Sequence:  Enzymatic Nucleic acid
  misc_feature (31)..(31): n stands for inosine
ccauucgucugaugaggccguuaggccgaangacagcc

SEQ ID NO: 5087 - RNA, 38 nt, Artificial Sequence
  Description of Artificial Sequence:  Enzymatic Nucleic acid
  misc_feature (31)..(31): n stands for inosine
ggaucuuacugaugaggccguuaggccgaancccauuc

SEQ ID NO: 5088 - RNA, 38 nt, Artificial Sequence
  Description of Artificial Sequence:  Enzymatic Nucleic acid
  misc_feature (31)..(31): n stands for inosine
gggaucuucugaugaggccguuaggccgaangcccauu

SEQ ID NO: 5089 - RNA, 38 nt, Artificial Sequence
  Description of Artificial Sequence:  Enzymatic Nucleic acid
  misc_feature (31)..(31): n stands for inosine
gauggacgcugaugaggccguuaggccgaanaucuuag

SEQ ID NO: 5090 - RNA, 38 nt, Artificial Sequence
  Description of Artificial Sequence:  Enzymatic Nucleic acid
  misc_feature (31)..(31): n stands for inosine
cgauggaccugaugaggccguuaggccgaangaucuua

SEQ ID NO: 5091 - RNA, 38 nt, Artificial Sequence
  Description of Artificial Sequence:  Enzymatic Nucleic acid
  misc_feature (31)..(31): n stands for inosine
guggcgaucugaugaggccguuaggccgaanacgggau

SEQ ID NO: 5092 - RNA, 38 nt, Artificial Sequence
  Description of Artificial Sequence:  Enzymatic Nucleic acid
  misc_feature (31)..(31): n stands for inosine
aguggcgacugaugaggccguuaggccgaangacggga

SEQ ID NO: 5093 - RNA, 38 nt, Artificial Sequence
  Description of Artificial Sequence:  Enzymatic Nucleic acid
  misc_feature (31)..(31): n stands for inosine
aucccagucugaugaggccguuaggccgaancgaugga

SEQ ID NO: 5094 - RNA, 38 nt, Artificial Sequence
  Description of Artificial Sequence:  Enzymatic Nucleic acid
  misc_feature (31)..(31): n stands for inosine
caucccagcugaugaggccguuaggccgaangcgaugg

SEQ ID NO: 5095 - RNA, 38 nt, Artificial Sequence
  Description of Artificial Sequence:  Enzymatic Nucleic acid
  misc_feature (31)..(31): n stands for inosine
accauccccugaugaggccguuaggccgaanuggcgau

SEQ ID NO: 5096 - RNA, 38 nt, Artificial Sequence
  Description of Artificial Sequence:  Enzymatic Nucleic acid
  misc_feature (31)..(31): n stands for inosine
aagaggagcugaugaggccguuaggccgaancccccac

SEQ ID NO: 5097 - RNA, 38 nt, Artificial Sequence
  Description of Artificial Sequence:  Enzymatic Nucleic acid
  misc_feature (31)..(31): n stands for inosine
caagaggacugaugaggccguuaggccgaangccccca

SEQ ID NO: 5098 - RNA, 38 nt, Artificial Sequence
  Description of Artificial Sequence:  Enzymatic Nucleic acid
  misc_feature (31)..(31): n stands for inosine
gcaagaggcugaugaggccguuaggccgaanggccccc

SEQ ID NO: 5099 - RNA, 38 nt, Artificial Sequence
  Description of Artificial Sequence:  Enzymatic Nucleic acid
  misc_feature (31)..(31): n stands for inosine
cagcaagacugaugaggccguuaggccgaanagggccc

SEQ ID NO: 5100 - RNA, 38 nt, Artificial Sequence
  Description of Artificial Sequence:  Enzymatic Nucleic acid
  misc_feature (31)..(31): n stands for inosine
gcagcaagcugaugaggccguuaggccgaangagggcc

SEQ ID NO: 5101 - RNA, 38 nt, Artificial Sequence
  Description of Artificial Sequence:  Enzymatic Nucleic acid
  misc_feature (31)..(31): n stands for inosine
cagcagcacugaugaggccguuaggccgaanaggaggg

SEQ ID NO: 5102 - RNA, 38 nt, Artificial Sequence
  Description of Artificial Sequence:  Enzymatic Nucleic acid
  misc_feature (31)..(31): n stands for inosine
ccaccagccugaugaggccguuaggccgaancaagagg

SEQ ID NO: 5103 - RNA, 38 nt, Artificial Sequence
  Description of Artificial Sequence:  Enzymatic Nucleic acid
  misc_feature (31)..(31): n stands for inosine
ccaccacccugaugaggccguuaggccgaancagcaag

SEQ ID NO: 5104 - RNA, 38 nt, Artificial Sequence
  Description of Artificial Sequence:  Enzymatic Nucleic acid
  misc_feature (31)..(31): n stands for inosine
auccccagcugaugaggccguuaggccgaanccaccac

SEQ ID NO: 5105 - RNA, 38 nt, Artificial Sequence
  Description of Artificial Sequence:  Enzymatic Nucleic acid
  misc_feature (31)..(31): n stands for inosine
gauccccacugaugaggccguuaggccgaangccacca

SEQ ID NO: 5106 - RNA, 38 nt, Artificial Sequence
  Description of Artificial Sequence:  Enzymatic Nucleic acid
  misc_feature (31)..(31): n stands for inosine
cgaucccccugaugaggccguuaggccgaanggccacc

SEQ ID NO: 5107 - RNA, 38 nt, Artificial Sequence
  Description of Artificial Sequence:  Enzymatic Nucleic acid
  misc_feature (31)..(31): n stands for inosine
caugaagacugaugaggccguuaggccgaanccgaucc

SEQ ID NO: 5108 - RNA, 38 nt, Artificial Sequence
  Description of Artificial Sequence:  Enzymatic Nucleic acid
  misc_feature (31)..(31): n stands for inosine
gcaugaagcugaugaggccguuaggccgaangccgauc

SEQ ID NO: 5109 - RNA, 38 nt, Artificial Sequence
  Description of Artificial Sequence:  Enzymatic Nucleic acid
  misc_feature (31)..(31): n stands for inosine
ucgcaugacugaugaggccguuaggccgaanaggccga

SEQ ID NO: 5110 - RNA, 38 nt, Artificial Sequence
  Description of Artificial Sequence:  Enzymatic Nucleic acid
  misc_feature (31)..(31): n stands for inosine
ccuucgcacugaugaggccguuaggccgaanaagaggc

SEQ ID NO: 5111 - RNA, 38 nt, Artificial Sequence
  Description of Artificial Sequence:  Enzymatic Nucleic acid
  misc_feature (31)..(31): n stands for inosine
aacgaugucugaugaggccguuaggccgaancgccuuc

SEQ ID NO: 5112 - RNA, 38 nt, Artificial Sequence
  Description of Artificial Sequence:  Enzymatic Nucleic acid
  misc_feature (31)..(31): n stands for inosine
gaacgaugcugaugaggccguuaggccgaangcgccuu

SEQ ID NO: 5113 - RNA, 38 nt, Artificial Sequence
  Description of Artificial Sequence:  Enzymatic Nucleic acid
  misc_feature (31)..(31): n stands for inosine
ccgaacgacugaugaggccguuaggccgaanuggcgcc

SEQ ID NO: 5114 - RNA, 38 nt, Artificial Sequence
  Description of Artificial Sequence:  Enzymatic Nucleic acid
  misc_feature (31)..(31): n stands for inosine
ccgcagcgcugaugaggccguuaggccgaancgcuucc

SEQ ID NO: 5115 - RNA, 38 nt, Artificial Sequence
  Description of Artificial Sequence:  Enzymatic Nucleic acid
  misc_feature (31)..(31): n stands for inosine
gccuccgccugaugaggccguuaggccgaancgugcgc

SEQ ID NO: 5116 - RNA, 38 nt, Artificial Sequence
  Description of Artificial Sequence:  Enzymatic Nucleic acid
  misc_feature (31)..(31): n stands for inosine
ccugcagccugaugaggccguuaggccgaanccuccgc

SEQ ID NO: 5117 - RNA, 38 nt, Artificial Sequence
  Description of Artificial Sequence:  Enzymatic Nucleic acid
  misc_feature (31)..(31): n stands for inosine
ucuccugccugaugaggccguuaggccgaancagccuc

SEQ ID NO: 5118 - RNA, 38 nt, Artificial Sequence
  Description of Artificial Sequence:  Enzymatic Nucleic acid
  misc_feature (31)..(31): n stands for inosine
cccucucccugaugaggccguuaggccgaancagcagc

SEQ ID NO: 5119 - RNA, 38 nt, Artificial Sequence
  Description of Artificial Sequence:  Enzymatic Nucleic acid
  misc_feature (31)..(31): n stands for inosine
gcuccacacugaugaggccguuaggccgaancucccuc

SEQ ID NO: 5120 - RNA, 38 nt, Artificial Sequence
  Description of Artificial Sequence:  Enzymatic Nucleic acid
  misc_feature (31)..(31): n stands for inosine
guguaagacugaugaggccguuaggccgaancuccaca

SEQ ID NO: 5121 - RNA, 38 nt, Artificial Sequence
  Description of Artificial Sequence:  Enzymatic Nucleic acid
  misc_feature (31)..(31): n stands for inosine
gguguaagcugaugaggccguuaggccgaangcuccac

SEQ ID NO: 5122 - RNA, 38 nt, Artificial Sequence
  Description of Artificial Sequence:  Enzymatic Nucleic acid
  misc_feature (31)..(31): n stands for inosine
uggguguacugaugaggccguuaggccgaanaggcucc

SEQ ID NO: 5123 - RNA, 38 nt, Artificial Sequence
  Description of Artificial Sequence:  Enzymatic Nucleic acid
  misc_feature (31)..(31): n stands for inosine
ccacugggcugaugaggccguuaggccgaanuaagagg

SEQ ID NO: 5124 - RNA, 38 nt, Artificial Sequence
  Description of Artificial Sequence:  Enzymatic Nucleic acid
  misc_feature (31)..(31): n stands for inosine
cuccacugcugaugaggccguuaggccgaanuguaaga

SEQ ID NO: 5125 - RNA, 38 nt, Artificial Sequence
  Description of Artificial Sequence:  Enzymatic Nucleic acid
  misc_feature (31)..(31): n stands for inosine
ucuccacucugaugaggccguuaggccgaanguguaag

SEQ ID NO: 5126 - RNA, 38 nt, Artificial Sequence
  Description of Artificial Sequence:  Enzymatic Nucleic acid
  misc_feature (31)..(31): n stands for inosine
uucuccaccugaugaggccguuaggccgaangguguaa

SEQ ID NO: 5127 - RNA, 38 nt, Artificial Sequence
  Description of Artificial Sequence:  Enzymatic Nucleic acid
  misc_feature (31)..(31): n stands for inosine
ugguugggcugaugaggccguuaggccgaancuucucc

SEQ ID NO: 5128 - RNA, 38 nt, Artificial Sequence
  Description of Artificial Sequence:  Enzymatic Nucleic acid
  misc_feature (31)..(31): n stands for inosine
cuugguugcugaugaggccguuaggccgaanagcuucu

SEQ ID NO: 5129 - RNA, 38 nt, Artificial Sequence
  Description of Artificial Sequence:  Enzymatic Nucleic acid
  misc_feature (31)..(31): n stands for inosine
gcuugguucugaugaggccguuaggccgaangagcuuc

SEQ ID NO: 5130 - RNA, 38 nt, Artificial Sequence
  Description of Artificial Sequence:  Enzymatic Nucleic acid
  misc_feature (31)..(31): n stands for inosine
agcuuggucugaugaggccguuaggccgaanggagcuu

SEQ ID NO: 5131 - RNA, 38 nt, Artificial Sequence
  Description of Artificial Sequence:  Enzymatic Nucleic acid
  misc_feature (31)..(31): n stands for inosine
gagagcuucugaugaggccguuaggccgaanuugggag

SEQ ID NO: 5132 - RNA, 38 nt, Artificial Sequence
  Description of Artificial Sequence:  Enzymatic Nucleic acid
  misc_feature (31)..(31): n stands for inosine
agagagcucugaugaggccguuaggccgaanguuggga

SEQ ID NO: 5133 - RNA, 38 nt, Artificial Sequence
  Description of Artificial Sequence:  Enzymatic Nucleic acid
  misc_feature (31)..(31): n stands for inosine
cucaagagcugaugaggccguuaggccgaancuugguu

SEQ ID NO: 5134 - RNA, 38 nt, Artificial Sequence
  Description of Artificial Sequence:  Enzymatic Nucleic acid
  misc_feature (31)..(31): n stands for inosine
uccucaagcugaugaggccguuaggccgaanagcuugg

SEQ ID NO: 5135 - RNA, 38 nt, Artificial Sequence
  Description of Artificial Sequence:  Enzymatic Nucleic acid
  misc_feature (31)..(31): n stands for inosine
gauccucacugaugaggccguuaggccgaanagagcuu

SEQ ID NO: 5136 - RNA, 38 nt, Artificial Sequence
  Description of Artificial Sequence:  Enzymatic Nucleic acid
  misc_feature (31)..(31): n stands for inosine
uuccuucacugaugaggccguuaggccgaanauccuca

SEQ ID NO: 5137 - RNA, 38 nt, Artificial Sequence
  Description of Artificial Sequence:  Enzymatic Nucleic acid
  misc_feature (31)..(31): n stands for inosine
uugaauuccugaugaggccguuaggccgaanuuuccuu

SEQ ID NO: 5138 - RNA, 38 nt, Artificial Sequence
  Description of Artificial Sequence:  Enzymatic Nucleic acid
  misc_feature (31)..(31): n stands for inosine
gaucuuuucugaugaggccguuaggccgaanaauucag

SEQ ID NO: 5139 - RNA, 38 nt, Artificial Sequence
  Description of Artificial Sequence:  Enzymatic Nucleic acid
  misc_feature (31)..(31): n stands for inosine
cagcacuucugaugaggccguuaggccgaanaucuuuu

SEQ ID NO: 5140 - RNA, 38 nt, Artificial Sequence
  Description of Artificial Sequence:  Enzymatic Nucleic acid
  misc_feature (31)..(31): n stands for inosine
cggagccccugaugaggccguuaggccgaancacuuug

SEQ ID NO: 5141 - RNA, 38 nt, Artificial Sequence
  Description of Artificial Sequence:  Enzymatic Nucleic acid
  misc_feature (31)..(31): n stands for inosine
cgcaccggcugaugaggccguuaggccgaancccagca

SEQ ID NO: 5142 - RNA, 38 nt, Artificial Sequence
  Description of Artificial Sequence:  Enzymatic Nucleic acid
  misc_feature (31)..(31): n stands for inosine
aacgcacccugaugaggccguuaggccgaanagcccag

SEQ ID NO: 5143 - RNA, 38 nt, Artificial Sequence
  Description of Artificial Sequence:  Enzymatic Nucleic acid
  misc_feature (31)..(31): n stands for inosine
auacaccgcugaugaggccguuaggccgaanccgaacg

SEQ ID NO: 5144 - RNA, 38 nt, Artificial Sequence
  Description of Artificial Sequence:  Enzymatic Nucleic acid
  misc_feature (31)..(31): n stands for inosine
ggauccagcugaugaggccguuaggccgaanucccuua

SEQ ID NO: 5145 - RNA, 38 nt, Artificial Sequence
  Description of Artificial Sequence:  Enzymatic Nucleic acid
  misc_feature (31)..(31): n stands for inosine
ugggaucccugaugaggccguuaggccgaanagucccu

SEQ ID NO: 5146 - RNA, 38 nt, Artificial Sequence
  Description of Artificial Sequence:  Enzymatic Nucleic acid
  misc_feature (31)..(31): n stands for inosine
accuucugcugaugaggccguuaggccgaanauccaga

SEQ ID NO: 5147 - RNA, 38 nt, Artificial Sequence
  Description of Artificial Sequence:  Enzymatic Nucleic acid
  misc_feature (31)..(31): n stands for inosine
caccuucucugaugaggccguuaggccgaangauccag

SEQ ID NO: 5148 - RNA, 38 nt, Artificial Sequence
  Description of Artificial Sequence:  Enzymatic Nucleic acid
  misc_feature (31)..(31): n stands for inosine
ucaccuuccugaugaggccguuaggccgaanggaucca

SEQ ID NO: 5149 - RNA, 38 nt, Artificial Sequence
  Description of Artificial Sequence:  Enzymatic Nucleic acid
  misc_feature (31)..(31): n stands for inosine
uagcgacgcugaugaggccguuaggccgaanaauuuua

SEQ ID NO: 5150 - RNA, 38 nt, Artificial Sequence
  Description of Artificial Sequence:  Enzymatic Nucleic acid
  misc_feature (31)..(31): n stands for inosine
auagcgaccugaugaggccguuaggccgaangaauuuu

SEQ ID NO: 5151 - RNA, 38 nt, Artificial Sequence
  Description of Artificial Sequence:  Enzymatic Nucleic acid
  misc_feature (31)..(31): n stands for inosine
uccuugaucugaugaggccguuaggccgaancgacggg

SEQ ID NO: 5152 - RNA, 38 nt, Artificial Sequence
  Description of Artificial Sequence:  Enzymatic Nucleic acid
  misc_feature (31)..(31): n stands for inosine
uaauuccucugaugaggccguuaggccgaanauagcga

SEQ ID NO: 5153 - RNA, 38 nt, Artificial Sequence
  Description of Artificial Sequence:  Enzymatic Nucleic acid
  misc_feature (31)..(31): n stands for inosine
ggagaugucugaugaggccguuaggccgaancuucucu

SEQ ID NO: 5154 - RNA, 38 nt, Artificial Sequence
  Description of Artificial Sequence:  Enzymatic Nucleic acid
  misc_feature (31)..(31): n stands for inosine
uucggagacugaugaggccguuaggccgaanuugcuuc

SEQ ID NO: 5155 - RNA, 38 nt, Artificial Sequence
  Description of Artificial Sequence:  Enzymatic Nucleic acid
  misc_feature (31)..(31): n stands for inosine
gcuuucggcugaugaggccguuaggccgaanauguugc

SEQ ID NO: 5156 - RNA, 38 nt, Artificial Sequence
  Description of Artificial Sequence:  Enzymatic Nucleic acid
  misc_feature (31)..(31): n stands for inosine
uggcuuuccugaugaggccguuaggccgaanagauguu

SEQ ID NO: 5157 - RNA, 38 nt, Artificial Sequence
  Description of Artificial Sequence:  Enzymatic Nucleic acid
  misc_feature (31)..(31): n stands for inosine
uccuuguucugaugaggccguuaggccgaancuuucgg

SEQ ID NO: 5158 - RNA, 38 nt, Artificial Sequence
  Description of Artificial Sequence:  Enzymatic Nucleic acid
  misc_feature (31)..(31): n stands for inosine
uuccuugucugaugaggccguuaggccgaangcuuucg

SEQ ID NO: 5159 - RNA, 38 nt, Artificial Sequence
  Description of Artificial Sequence:  Enzymatic Nucleic acid
  misc_feature (31)..(31): n stands for inosine
gauuuccucugaugaggccguuaggccgaanuuggcuu

SEQ ID NO: 5160 - RNA, 38 nt, Artificial Sequence
  Description of Artificial Sequence:  Enzymatic Nucleic acid
  misc_feature (31)..(31): n stands for inosine
uucaucgacugaugaggccguuaggccgaanauuuccu

SEQ ID NO: 5161 - RNA, 38 nt, Artificial Sequence
  Description of Artificial Sequence:  Enzymatic Nucleic acid
  misc_feature (31)..(31): n stands for inosine
cuucaucgcugaugaggccguuaggccgaangauuucc

SEQ ID NO: 5162 - RNA, 38 nt, Artificial Sequence
  Description of Artificial Sequence:  Enzymatic Nucleic acid
  misc_feature (31)..(31): n stands for inosine
aucacguacugaugaggccguuaggccgaancuucauc

SEQ ID NO: 5163 - RNA, 38 nt, Artificial Sequence
  Description of Artificial Sequence:  Enzymatic Nucleic acid
  misc_feature (31)..(31): n stands for inosine
caucacgucugaugaggccguuaggccgaangcuucau

SEQ ID NO: 5164 - RNA, 38 nt, Artificial Sequence
  Description of Artificial Sequence:  Enzymatic Nucleic acid
  misc_feature (31)..(31): n stands for inosine
uccacgcucugaugaggccguuaggccgaanccaucac

SEQ ID NO: 5165 - RNA, 38 nt, Artificial Sequence
  Description of Artificial Sequence:  Enzymatic Nucleic acid
  misc_feature (31)..(31): n stands for inosine
guccacgccugaugaggccguuaggccgaangccauca

SEQ ID NO: 5166 - RNA, 38 nt, Artificial Sequence
  Description of Artificial Sequence:  Enzymatic Nucleic acid
  misc_feature (31)..(31): n stands for inosine
gugggggucugaugaggccguuaggccgaanuccacgc

SEQ ID NO: 5167 - RNA, 38 nt, Artificial Sequence
  Description of Artificial Sequence:  Enzymatic Nucleic acid
  misc_feature (31)..(31): n stands for inosine
cacgugggcugaugaggccguuaggccgaanuugucca

SEQ ID NO: 5168 - RNA, 38 nt, Artificial Sequence
  Description of Artificial Sequence:  Enzymatic Nucleic acid
  misc_feature (31)..(31): n stands for inosine
acacguggcugaugaggccguuaggccgaanguugucc

SEQ ID NO: 5169 - RNA, 38 nt, Artificial Sequence
  Description of Artificial Sequence:  Enzymatic Nucleic acid
  misc_feature (31)..(31): n stands for inosine
cacacgugcugaugaggccguuaggccgaangguuguc

SEQ ID NO: 5170 - RNA, 38 nt, Artificial Sequence
  Description of Artificial Sequence:  Enzymatic Nucleic acid
  misc_feature (31)..(31): n stands for inosine
gcacacgucugaugaggccguuaggccgaanggguugu

SEQ ID NO: 5171 - RNA, 38 nt, Artificial Sequence
  Description of Artificial Sequence:  Enzymatic Nucleic acid
  misc_feature (31)..(31): n stands for inosine
ggcacacgcugaugaggccguuaggccgaangggguug

SEQ ID NO: 5172 - RNA, 38 nt, Artificial Sequence
  Description of Artificial Sequence:  Enzymatic Nucleic acid
  misc_feature (31)..(31): n stands for inosine
cagcaggccugaugaggccguuaggccgaancacacgu

SEQ ID NO: 5173 - RNA, 38 nt, Artificial Sequence
  Description of Artificial Sequence:  Enzymatic Nucleic acid
  misc_feature (31)..(31): n stands for inosine
gcccagcacugaugaggccguuaggccgaancggcaca

SEQ ID NO: 5174 - RNA, 38 nt, Artificial Sequence
  Description of Artificial Sequence:  Enzymatic Nucleic acid
  misc_feature (31)..(31): n stands for inosine
ugcccagccugaugaggccguuaggccgaangcggcac

SEQ ID NO: 5175 - RNA, 38 nt, Artificial Sequence
  Description of Artificial Sequence:  Enzymatic Nucleic acid
  misc_feature (31)..(31): n stands for inosine
agaugccccugaugaggccguuaggccgaancaggcgg

SEQ ID NO: 5176 - RNA, 38 nt, Artificial Sequence
  Description of Artificial Sequence:  Enzymatic Nucleic acid
  misc_feature (31)..(31): n stands for inosine
gaggcagacugaugaggccguuaggccgaancccagca

SEQ ID NO: 5177 - RNA, 38 nt, Artificial Sequence
  Description of Artificial Sequence:  Enzymatic Nucleic acid
  misc_feature (31)..(31): n stands for inosine
ggugaggccugaugaggccguuaggccgaanaugccca

SEQ ID NO: 5178 - RNA, 38 nt, Artificial Sequence
  Description of Artificial Sequence:  Enzymatic Nucleic acid
  misc_feature (31)..(31): n stands for inosine
ggaggugacugaugaggccguuaggccgaancagaugc

SEQ ID NO: 5179 - RNA, 38 nt, Artificial Sequence
  Description of Artificial Sequence:  Enzymatic Nucleic acid
  misc_feature (31)..(31): n stands for inosine
uggaggugcugaugaggccguuaggccgaangcagaug

SEQ ID NO: 5180 - RNA, 38 nt, Artificial Sequence
  Description of Artificial Sequence:  Enzymatic Nucleic acid
  misc_feature (31)..(31): n stands for inosine
gguggaggcugaugaggccguuaggccgaanaggcaga

SEQ ID NO: 5181 - RNA, 38 nt, Artificial Sequence
  Description of Artificial Sequence:  Enzymatic Nucleic acid
  misc_feature (31)..(31): n stands for inosine
acgguggacugaugaggccguuaggccgaanugaggca

SEQ ID NO: 5182 - RNA, 38 nt, Artificial Sequence
  Description of Artificial Sequence:  Enzymatic Nucleic acid
  misc_feature (31)..(31): n stands for inosine
cacgguggcugaugaggccguuaggccgaangugaggc

SEQ ID NO: 5183 - RNA, 38 nt, Artificial Sequence
  Description of Artificial Sequence:  Enzymatic Nucleic acid
  misc_feature (31)..(31): n stands for inosine
ugcacggucugaugaggccguuaggccgaanaggugag

SEQ ID NO: 5184 - RNA, 38 nt, Artificial Sequence
  Description of Artificial Sequence:  Enzymatic Nucleic acid
  misc_feature (31)..(31): n stands for inosine
uugcacggcugaugaggccguuaggccgaangagguga

SEQ ID NO: 5185 - RNA, 38 nt, Artificial Sequence
  Description of Artificial Sequence:  Enzymatic Nucleic acid
  misc_feature (31)..(31): n stands for inosine
aguugcaccugaugaggccguuaggccgaanuggaggu

SEQ ID NO: 5186 - RNA, 38 nt, Artificial Sequence
  Description of Artificial Sequence:  Enzymatic Nucleic acid
  misc_feature (31)..(31): n stands for inosine
ugaugagucugaugaggccguuaggccgaancacggug

SEQ ID NO: 5187 - RNA, 38 nt, Artificial Sequence
  Description of Artificial Sequence:  Enzymatic Nucleic acid
  misc_feature (31)..(31): n stands for inosine
gcgugaugcugaugaggccguuaggccgaanuugcacg

SEQ ID NO: 5188 - RNA, 38 nt, Artificial Sequence
  Description of Artificial Sequence:  Enzymatic Nucleic acid
  misc_feature (31)..(31): n stands for inosine
cugcgugacugaugaggccguuaggccgaanaguugca

SEQ ID NO: 5189 - RNA, 38 nt, Artificial Sequence
  Description of Artificial Sequence:  Enzymatic Nucleic acid
  misc_feature (31)..(31): n stands for inosine
gagcugcgcugaugaggccguuaggccgaanaugaguu

SEQ ID NO: 5190 - RNA, 38 nt, Artificial Sequence
  Description of Artificial Sequence:  Enzymatic Nucleic acid
  misc_feature (31)..(31): n stands for inosine
gcaugagccugaugaggccguuaggccgaancgugaug

SEQ ID NO: 5191 - RNA, 38 nt, Artificial Sequence
  Description of Artificial Sequence:  Enzymatic Nucleic acid
  misc_feature (31)..(31): n stands for inosine
agggcaugcugaugaggccguuaggccgaancugcgug

SEQ ID NO: 5192 - RNA, 38 nt, Artificial Sequence
  Description of Artificial Sequence:  Enzymatic Nucleic acid
  misc_feature (31)..(31): n stands for inosine
gaagggcacugaugaggccguuaggccgaanagcugcg

SEQ ID NO: 5193 - RNA, 38 nt, Artificial Sequence
  Description of Artificial Sequence:  Enzymatic Nucleic acid
  misc_feature (31)..(31): n stands for inosine
agccgaagcugaugaggccguuaggccgaancaugagc

SEQ ID NO: 5194 - RNA, 38 nt, Artificial Sequence
  Description of Artificial Sequence:  Enzymatic Nucleic acid
  misc_feature (31)..(31): n stands for inosine
cagccgaacugaugaggccguuaggccgaangcaugag

SEQ ID NO: 5195 - RNA, 38 nt, Artificial Sequence
  Description of Artificial Sequence:  Enzymatic Nucleic acid
  misc_feature (31)..(31): n stands for inosine
gcagccgacugaugaggccguuaggccgaanggcauga

SEQ ID NO: 5196 - RNA, 38 nt, Artificial Sequence
  Description of Artificial Sequence:  Enzymatic Nucleic acid
  misc_feature (31)..(31): n stands for inosine
caggaggccugaugaggccguuaggccgaanccgaagg

SEQ ID NO: 5197 - RNA, 38 nt, Artificial Sequence
  Description of Artificial Sequence:  Enzymatic Nucleic acid
  misc_feature (31)..(31): n stands for inosine
guccaggacugaugaggccguuaggccgaancagccga

SEQ ID NO: 5198 - RNA, 38 nt, Artificial Sequence
  Description of Artificial Sequence:  Enzymatic Nucleic acid
  misc_feature (31)..(31): n stands for inosine
aguccaggcugaugaggccguuaggccgaangcagccg

SEQ ID NO: 5199 - RNA, 38 nt, Artificial Sequence
  Description of Artificial Sequence:  Enzymatic Nucleic acid
  misc_feature (31)..(31): n stands for inosine
auaguccacugaugaggccguuaggccgaanaggcagc

SEQ ID NO: 5200 - RNA, 38 nt, Artificial Sequence
  Description of Artificial Sequence:  Enzymatic Nucleic acid
  misc_feature (31)..(31): n stands for inosine
cauagucccugaugaggccguuaggccgaangaggcag

SEQ ID NO: 5201 - RNA, 38 nt, Artificial Sequence
  Description of Artificial Sequence:  Enzymatic Nucleic acid
  misc_feature (31)..(31): n stands for inosine
ccggacaucugaugaggccguuaggccgaanuccagga

SEQ ID NO: 5202 - RNA, 38 nt, Artificial Sequence
  Description of Artificial Sequence:  Enzymatic Nucleic acid
  misc_feature (31)..(31): n stands for inosine
guguuccccugaugaggccguuaggccgaanacauagu

SEQ ID NO: 5203 - RNA, 38 nt, Artificial Sequence
  Description of Artificial Sequence:  Enzymatic Nucleic acid
  misc_feature (31)..(31): n stands for inosine
ugucuuugcugaugaggccguuaggccgaanuucccgg

SEQ ID NO: 5204 - RNA, 38 nt, Artificial Sequence
  Description of Artificial Sequence:  Enzymatic Nucleic acid
  misc_feature (31)..(31): n stands for inosine
auugucuucugaugaggccguuaggccgaanuguuccc

SEQ ID NO: 5205 - RNA, 38 nt, Artificial Sequence
  Description of Artificial Sequence:  Enzymatic Nucleic acid
  misc_feature (31)..(31): n stands for inosine
gccaauaucugaugaggccguuaggccgaanucuuugu

SEQ ID NO: 5206 - RNA, 38 nt, Artificial Sequence
  Description of Artificial Sequence:  Enzymatic Nucleic acid
  misc_feature (31)..(31): n stands for inosine
guacugggcugaugaggccguuaggccgaanccaauau

SEQ ID NO: 5207 - RNA, 38 nt, Artificial Sequence
  Description of Artificial Sequence:  Enzymatic Nucleic acid
  misc_feature (31)..(31): n stands for inosine
agguacugcugaugaggccguuaggccgaanagccaau

SEQ ID NO: 5208 - RNA, 38 nt, Artificial Sequence
  Description of Artificial Sequence:  Enzymatic Nucleic acid
  misc_feature (31)..(31): n stands for inosine
cagguacucugaugaggccguuaggccgaangagccaa

SEQ ID NO: 5209 - RNA, 38 nt, Artificial Sequence
  Description of Artificial Sequence:  Enzymatic Nucleic acid
  misc_feature (31)..(31): n stands for inosine
gcagguaccugaugaggccguuaggccgaanggagcca

SEQ ID NO: 5210 - RNA, 38 nt, Artificial Sequence
  Description of Artificial Sequence:  Enzymatic Nucleic acid
  misc_feature (31)..(31): n stands for inosine
guugagcacugaugaggccguuaggccgaanuacuggg

SEQ ID NO: 5211 - RNA, 38 nt, Artificial Sequence
  Description of Artificial Sequence:  Enzymatic Nucleic acid
  misc_feature (31)..(31): n stands for inosine
aguugagccugaugaggccguuaggccgaanguacugg

SEQ ID NO: 5212 - RNA, 38 nt, Artificial Sequence
  Description of Artificial Sequence:  Enzymatic Nucleic acid
  misc_feature (31)..(31): n stands for inosine
accaguugcugaugaggccguuaggccgaancagguac

SEQ ID NO: 5213 - RNA, 38 nt, Artificial Sequence
  Description of Artificial Sequence:  Enzymatic Nucleic acid
  misc_feature (31)..(31): n stands for inosine
acaccagucugaugaggccguuaggccgaanagcaggu

SEQ ID NO: 5214 - RNA, 38 nt, Artificial Sequence
  Description of Artificial Sequence:  Enzymatic Nucleic acid
  misc_feature (31)..(31): n stands for inosine
cacacacccugaugaggccguuaggccgaanuugagca

SEQ ID NO: 5215 - RNA, 38 nt, Artificial Sequence
  Description of Artificial Sequence:  Enzymatic Nucleic acid
  misc_feature (31)..(31): n stands for inosine
uugcgauccugaugaggccguuaggccgaancacacac

SEQ ID NO: 5216 - RNA, 38 nt, Artificial Sequence
  Description of Artificial Sequence:  Enzymatic Nucleic acid
  misc_feature (31)..(31): n stands for inosine
augcccuucugaugaggccguuaggccgaancgaucug

SEQ ID NO: 5217 - RNA, 38 nt, Artificial Sequence
  Description of Artificial Sequence:  Enzymatic Nucleic acid
  misc_feature (31)..(31): n stands for inosine
guaguucacugaugaggccguuaggccgaancccuuug

SEQ ID NO: 5218 - RNA, 38 nt, Artificial Sequence
  Description of Artificial Sequence:  Enzymatic Nucleic acid
  misc_feature (31)..(31): n stands for inosine
cuccaagucugaugaggccguuaggccgaanuucaugc

SEQ ID NO: 5219 - RNA, 38 nt, Artificial Sequence
  Description of Artificial Sequence:  Enzymatic Nucleic acid
  misc_feature (31)..(31): n stands for inosine
guccuccacugaugaggccguuaggccgaanuaguuca

SEQ ID NO: 5220 - RNA, 38 nt, Artificial Sequence
  Description of Artificial Sequence:  Enzymatic Nucleic acid
  misc_feature (31)..(31): n stands for inosine
caagcgaccugaugaggccguuaggccgaanuccucca

SEQ ID NO: 5221 - RNA, 38 nt, Artificial Sequence
  Description of Artificial Sequence:  Enzymatic Nucleic acid
  misc_feature (31)..(31): n stands for inosine
gugcaccacugaugaggccguuaggccgaancgacggu

SEQ ID NO: 5222 - RNA, 38 nt, Artificial Sequence
  Description of Artificial Sequence:  Enzymatic Nucleic acid
  misc_feature (31)..(31): n stands for inosine
ggucgcggcugaugaggccguuaggccgaancaccaag

SEQ ID NO: 5223 - RNA, 38 nt, Artificial Sequence
  Description of Artificial Sequence:  Enzymatic Nucleic acid
  misc_feature (31)..(31): n stands for inosine
caggucgccugaugaggccguuaggccgaanugcacca

SEQ ID NO: 5224 - RNA, 38 nt, Artificial Sequence
  Description of Artificial Sequence:  Enzymatic Nucleic acid
  misc_feature (31)..(31): n stands for inosine
ggcugccacugaugaggccguuaggccgaanucgcggu

SEQ ID NO: 5225 - RNA, 38 nt, Artificial Sequence
  Description of Artificial Sequence:  Enzymatic Nucleic acid
  misc_feature (31)..(31): n stands for inosine
uggcugcccugaugaggccguuaggccgaangucgcgg

SEQ ID NO: 5226 - RNA, 38 nt, Artificial Sequence
  Description of Artificial Sequence:  Enzymatic Nucleic acid
  misc_feature (31)..(31): n stands for inosine
uuccuggccugaugaggccguuaggccgaanccagguc

SEQ ID NO: 5227 - RNA, 38 nt, Artificial Sequence
  Description of Artificial Sequence:  Enzymatic Nucleic acid
  misc_feature (31)..(31): n stands for inosine
acguuccucugaugaggccguuaggccgaancugccag

SEQ ID NO: 5228 - RNA, 38 nt, Artificial Sequence
  Description of Artificial Sequence:  Enzymatic Nucleic acid
  misc_feature (31)..(31): n stands for inosine
uacguucccugaugaggccguuaggccgaangcugcca

SEQ ID NO: 5229 - RNA, 38 nt, Artificial Sequence
  Description of Artificial Sequence:  Enzymatic Nucleic acid
  misc_feature (31)..(31): n stands for inosine
uuuucacccugaugaggccguuaggccgaanuacguuc

SEQ ID NO: 5230 - RNA, 38 nt, Artificial Sequence
  Description of Artificial Sequence:  Enzymatic Nucleic acid
  misc_feature (31)..(31): n stands for inosine
ugcugcggcugaugaggccguuaggccgaanuuuucac

SEQ ID NO: 5231 - RNA, 38 nt, Artificial Sequence
  Description of Artificial Sequence:  Enzymatic Nucleic acid
  misc_feature (31)..(31): n stands for inosine
caugcugccugaugaggccguuaggccgaanuguuuuc

SEQ ID NO: 5232 - RNA, 38 nt, Artificial Sequence
  Description of Artificial Sequence:  Enzymatic Nucleic acid
  misc_feature (31)..(31): n stands for inosine
ugacaugccugaugaggccguuaggccgaancgguguu

SEQ ID NO: 5233 - RNA, 38 nt, Artificial Sequence
  Description of Artificial Sequence:  Enzymatic Nucleic acid
  misc_feature (31)..(31): n stands for inosine
ucuugacacugaugaggccguuaggccgaancugcggu

SEQ ID NO: 5234 - RNA, 38 nt, Artificial Sequence
  Description of Artificial Sequence:  Enzymatic Nucleic acid
  misc_feature (31)..(31): n stands for inosine
ugugaucucugaugaggccguuaggccgaanacaugcu

SEQ ID NO: 5235 - RNA, 38 nt, Artificial Sequence
  Description of Artificial Sequence:  Enzymatic Nucleic acid
  misc_feature (31)..(31): n stands for inosine
aaaaucugcugaugaggccguuaggccgaanaucuuga

SEQ ID NO: 5236 - RNA, 38 nt, Artificial Sequence
  Description of Artificial Sequence:  Enzymatic Nucleic acid
  misc_feature (31)..(31): n stands for inosine
ccaaaauccugaugaggccguuaggccgaanugaucuu

SEQ ID NO: 5237 - RNA, 38 nt, Artificial Sequence
  Description of Artificial Sequence:  Enzymatic Nucleic acid
  misc_feature (31)..(31): n stands for inosine
guuuggcccugaugaggccguuaggccgaancccaaaa

SEQ ID NO: 5238 - RNA, 38 nt, Artificial Sequence
  Description of Artificial Sequence:  Enzymatic Nucleic acid
  misc_feature (31)..(31): n stands for inosine
agcaguuucugaugaggccguuaggccgaanccagccc

SEQ ID NO: 5239 - RNA, 38 nt, Artificial Sequence
  Description of Artificial Sequence:  Enzymatic Nucleic acid
  misc_feature (31)..(31): n stands for inosine
cagcaguucugaugaggccguuaggccgaangccagcc

SEQ ID NO: 5240 - RNA, 38 nt, Artificial Sequence
  Description of Artificial Sequence:  Enzymatic Nucleic acid
  misc_feature (31)..(31): n stands for inosine
cacccagccugaugaggccguuaggccgaanuuuggcc

SEQ ID NO: 5241 - RNA, 38 nt, Artificial Sequence
  Description of Artificial Sequence:  Enzymatic Nucleic acid
  misc_feature (31)..(31): n stands for inosine
ccgcaccccugaugaggccguuaggccgaancaguuug

SEQ ID NO: 5242 - RNA, 38 nt, Artificial Sequence
  Description of Artificial Sequence:  Enzymatic Nucleic acid
  misc_feature (31)..(31): n stands for inosine
uucugcaucugaugaggccguuaggccgaanuauucuu

SEQ ID NO: 5243 - RNA, 38 nt, Artificial Sequence
  Description of Artificial Sequence:  Enzymatic Nucleic acid
  misc_feature (31)..(31): n stands for inosine
cuucugcacugaugaggccguuaggccgaanguauucu

SEQ ID NO: 5244 - RNA, 38 nt, Artificial Sequence
  Description of Artificial Sequence:  Enzymatic Nucleic acid
  misc_feature (31)..(31): n stands for inosine
ccuccuuccugaugaggccguuaggccgaancauggua

SEQ ID NO: 5245 - RNA, 38 nt, Artificial Sequence
  Description of Artificial Sequence:  Enzymatic Nucleic acid
  misc_feature (31)..(31): n stands for inosine
aggcacuucugaugaggccguuaggccgaanccuccuu

SEQ ID NO: 5246 - RNA, 38 nt, Artificial Sequence
  Description of Artificial Sequence:  Enzymatic Nucleic acid
  misc_feature (31)..(31): n stands for inosine
acuugauacugaugaggccguuaggccgaancacuuug

SEQ ID NO: 5247 - RNA, 38 nt, Artificial Sequence
  Description of Artificial Sequence:  Enzymatic Nucleic acid
  misc_feature (31)..(31): n stands for inosine
cacuugaucugaugaggccguuaggccgaangcacuuu

SEQ ID NO: 5248 - RNA, 38 nt, Artificial Sequence
  Description of Artificial Sequence:  Enzymatic Nucleic acid
  misc_feature (31)..(31): n stands for inosine
cauccacucugaugaggccguuaggccgaanauaggca

SEQ ID NO: 5249 - RNA, 38 nt, Artificial Sequence
  Description of Artificial Sequence:  Enzymatic Nucleic acid
  misc_feature (31)..(31): n stands for inosine
gauuccaacugaugaggccguuaggccgaanccaucca

SEQ ID NO: 5250 - RNA, 38 nt, Artificial Sequence
  Description of Artificial Sequence:  Enzymatic Nucleic acid
  misc_feature (31)..(31): n stands for inosine
uguaaaaucugaugaggccguuaggccgaanauuccaa

SEQ ID NO: 5251 - RNA, 38 nt, Artificial Sequence
  Description of Artificial Sequence:  Enzymatic Nucleic acid
  misc_feature (31)..(31): n stands for inosine
agauucugcugaugaggccguuaggccgaanuaaaauu

SEQ ID NO: 5252 - RNA, 38 nt, Artificial Sequence
  Description of Artificial Sequence:  Enzymatic Nucleic acid
  misc_feature (31)..(31): n stands for inosine
auagauuccugaugaggccguuaggccgaanuguaaaa

SEQ ID NO: 5253 - RNA, 38 nt, Artificial Sequence
  Description of Artificial Sequence:  Enzymatic Nucleic acid
  misc_feature (31)..(31): n stands for inosine
guggguaucugaugaggccguuaggccgaanauucugu

SEQ ID NO: 5254 - RNA, 38 nt, Artificial Sequence
  Description of Artificial Sequence:  Enzymatic Nucleic acid
  misc_feature (31)..(31): n stands for inosine
cucuggugcugaugaggccguuaggccgaanuauagau

SEQ ID NO: 5255 - RNA, 38 nt, Artificial Sequence
  Description of Artificial Sequence:  Enzymatic Nucleic acid
  misc_feature (31)..(31): n stands for inosine
acucuggucugaugaggccguuaggccgaanguauaga

SEQ ID NO: 5256 - RNA, 38 nt, Artificial Sequence
  Description of Artificial Sequence:  Enzymatic Nucleic acid
  misc_feature (31)..(31): n stands for inosine
cacucuggcugaugaggccguuaggccgaangguauag

SEQ ID NO: 5257 - RNA, 38 nt, Artificial Sequence
  Description of Artificial Sequence:  Enzymatic Nucleic acid
  misc_feature (31)..(31): n stands for inosine
aucacucucugaugaggccguuaggccgaanuggguau

SEQ ID NO: 5258 - RNA, 38 nt, Artificial Sequence
  Description of Artificial Sequence:  Enzymatic Nucleic acid
  misc_feature (31)..(31): n stands for inosine
caucacuccugaugaggccguuaggccgaangugggua

SEQ ID NO: 5259 - RNA, 38 nt, Artificial Sequence
  Description of Artificial Sequence:  Enzymatic Nucleic acid
  misc_feature (31)..(31): n stands for inosine
guagcucccugaugaggccguuaggccgaanacaucac

SEQ ID NO: 5260 - RNA, 38 nt, Artificial Sequence
  Description of Artificial Sequence:  Enzymatic Nucleic acid
  misc_feature (31)..(31): n stands for inosine
caccccgucugaugaggccguuaggccgaancuccaga

SEQ ID NO: 5261 - RNA, 38 nt, Artificial Sequence
  Description of Artificial Sequence:  Enzymatic Nucleic acid
  misc_feature (31)..(31): n stands for inosine
ucccaaaccugaugaggccguuaggccgaanucacccc

SEQ ID NO: 5262 - RNA, 38 nt, Artificial Sequence
  Description of Artificial Sequence:  Enzymatic Nucleic acid
  misc_feature (31)..(31): n stands for inosine
gauccaaacugaugaggccguuaggccgaanucaucaa

SEQ ID NO: 5263 - RNA, 38 nt, Artificial Sequence
  Description of Artificial Sequence:  Enzymatic Nucleic acid
  misc_feature (31)..(31): n stands for inosine
ggauccaacugaugaggccguuaggccgaangucauca

SEQ ID NO: 5264 - RNA, 38 nt, Artificial Sequence
  Description of Artificial Sequence:  Enzymatic Nucleic acid
  misc_feature (31)..(31): n stands for inosine
uauggcuucugaugaggccguuaggccgaanauccaaa

SEQ ID NO: 5265 - RNA, 38 nt, Artificial Sequence
  Description of Artificial Sequence:  Enzymatic Nucleic acid
  misc_feature (31)..(31): n stands for inosine
auauggcucugaugaggccguuaggccgaangauccaa

SEQ ID NO: 5266 - RNA, 38 nt, Artificial Sequence
  Description of Artificial Sequence:  Enzymatic Nucleic acid
  misc_feature (31)..(31): n stands for inosine
cgucauaucugaugaggccguuaggccgaancuuggau

SEQ ID NO: 5267 - RNA, 38 nt, Artificial Sequence
  Description of Artificial Sequence:  Enzymatic Nucleic acid
  misc_feature (31)..(31): n stands for inosine
ccgucauacugaugaggccguuaggccgaangcuugga

SEQ ID NO: 5268 - RNA, 38 nt, Artificial Sequence
  Description of Artificial Sequence:  Enzymatic Nucleic acid
  misc_feature (31)..(31): n stands for inosine
gcuggcagcugaugaggccguuaggccgaanauuccgu

SEQ ID NO: 5269 - RNA, 38 nt, Artificial Sequence
  Description of Artificial Sequence:  Enzymatic Nucleic acid
  misc_feature (31)..(31): n stands for inosine
cgcuggcacugaugaggccguuaggccgaangauuccg

SEQ ID NO: 5270 - RNA, 38 nt, Artificial Sequence
  Description of Artificial Sequence:  Enzymatic Nucleic acid
  misc_feature (31)..(31): n stands for inosine
ucgcuggccugaugaggccguuaggccgaanggauucc

SEQ ID NO: 5271 - RNA, 38 nt, Artificial Sequence
  Description of Artificial Sequence:  Enzymatic Nucleic acid
  misc_feature (31)..(31): n stands for inosine
aucucgcucugaugaggccguuaggccgaancagggau

SEQ ID NO: 5272 - RNA, 38 nt, Artificial Sequence
  Description of Artificial Sequence:  Enzymatic Nucleic acid
  misc_feature (31)..(31): n stands for inosine
gaucucgccugaugaggccguuaggccgaangcaggga

SEQ ID NO: 5273 - RNA, 38 nt, Artificial Sequence
  Description of Artificial Sequence:  Enzymatic Nucleic acid
  misc_feature (31)..(31): n stands for inosine
gauggaggcugaugaggccguuaggccgaanaucucgc

SEQ ID NO: 5274 - RNA, 38 nt, Artificial Sequence
  Description of Artificial Sequence:  Enzymatic Nucleic acid
  misc_feature (31)..(31): n stands for inosine
aggauggacugaugaggccguuaggccgaanagaucuc

SEQ ID NO: 5275 - RNA, 38 nt, Artificial Sequence
  Description of Artificial Sequence:  Enzymatic Nucleic acid
  misc_feature (31)..(31): n stands for inosine
caggauggcugaugaggccguuaggccgaangagaucu

SEQ ID NO: 5276 - RNA, 38 nt, Artificial Sequence
  Description of Artificial Sequence:  Enzymatic Nucleic acid
  misc_feature (31)..(31): n stands for inosine
uccaggaucugaugaggccguuaggccgaanaggagau

SEQ ID NO: 5277 - RNA, 38 nt, Artificial Sequence
  Description of Artificial Sequence:  Enzymatic Nucleic acid
  misc_feature (31)..(31): n stands for inosine
cuccaggacugaugaggccguuaggccgaangaggaga

SEQ ID NO: 5278 - RNA, 38 nt, Artificial Sequence
  Description of Artificial Sequence:  Enzymatic Nucleic acid
  misc_feature (31)..(31): n stands for inosine
uuucuccacugaugaggccguuaggccgaanauggagg

SEQ ID NO: 5279 - RNA, 38 nt, Artificial Sequence
  Description of Artificial Sequence:  Enzymatic Nucleic acid
  misc_feature (31)..(31): n stands for inosine
cuuucucccugaugaggccguuaggccgaangauggag

SEQ ID NO: 5280 - RNA, 38 nt, Artificial Sequence
  Description of Artificial Sequence:  Enzymatic Nucleic acid
  misc_feature (31)..(31): n stands for inosine
cugagggacugaugaggccguuaggccgaancguucuc

SEQ ID NO: 5281 - RNA, 38 nt, Artificial Sequence
  Description of Artificial Sequence:  Enzymatic Nucleic acid
  misc_feature (31)..(31): n stands for inosine
gcugagggcugaugaggccguuaggccgaangcguucu

SEQ ID NO: 5282 - RNA, 38 nt, Artificial Sequence
  Description of Artificial Sequence:  Enzymatic Nucleic acid
  misc_feature (31)..(31): n stands for inosine
uggcugagcugaugaggccguuaggccgaanaggcguu

SEQ ID NO: 5283 - RNA, 38 nt, Artificial Sequence
  Description of Artificial Sequence:  Enzymatic Nucleic acid
  misc_feature (31)..(31): n stands for inosine
guggcugacugaugaggccguuaggccgaangaggcgu

SEQ ID NO: 5284 - RNA, 38 nt, Artificial Sequence
  Description of Artificial Sequence:  Enzymatic Nucleic acid
  misc_feature (31)..(31): n stands for inosine
gguggcugcugaugaggccguuaggccgaanggaggcg

SEQ ID NO: 5285 - RNA, 38 nt, Artificial Sequence
  Description of Artificial Sequence:  Enzymatic Nucleic acid
  misc_feature (31)..(31): n stands for inosine
uggguggccugaugaggccguuaggccgaanagggagg

SEQ ID NO: 5286 - RNA, 38 nt, Artificial Sequence
  Description of Artificial Sequence:  Enzymatic Nucleic acid
  misc_feature (31)..(31): n stands for inosine
auaugggucugaugaggccguuaggccgaancugaggg

SEQ ID NO: 5287 - RNA, 38 nt, Artificial Sequence
  Description of Artificial Sequence:  Enzymatic Nucleic acid
  misc_feature (31)..(31): n stands for inosine
cauaugggcugaugaggccguuaggccgaangcugagg

SEQ ID NO: 5288 - RNA, 38 nt, Artificial Sequence
  Description of Artificial Sequence:  Enzymatic Nucleic acid
  misc_feature (31)..(31): n stands for inosine
uacauaugcugaugaggccguuaggccgaanuggcuga

SEQ ID NO: 5289 - RNA, 38 nt, Artificial Sequence
  Description of Artificial Sequence:  Enzymatic Nucleic acid
  misc_feature (31)..(31): n stands for inosine
guacauaucugaugaggccguuaggccgaanguggcug

SEQ ID NO: 5290 - RNA, 38 nt, Artificial Sequence
  Description of Artificial Sequence:  Enzymatic Nucleic acid
  misc_feature (31)..(31): n stands for inosine
gguacauacugaugaggccguuaggccgaangguggcu

SEQ ID NO: 5291 - RNA, 38 nt, Artificial Sequence
  Description of Artificial Sequence:  Enzymatic Nucleic acid
  misc_feature (31)..(31): n stands for inosine
acaucgaucugaugaggccguuaggccgaanuacauau

SEQ ID NO: 5292 - RNA, 38 nt, Artificial Sequence
  Description of Artificial Sequence:  Enzymatic Nucleic acid
  misc_feature (31)..(31): n stands for inosine
gacaucgacugaugaggccguuaggccgaanguacaua

SEQ ID NO: 5293 - RNA, 38 nt, Artificial Sequence
  Description of Artificial Sequence:  Enzymatic Nucleic acid
  misc_feature (31)..(31): n stands for inosine
gaucaugucugaugaggccguuaggccgaanacaucga

SEQ ID NO: 5294 - RNA, 38 nt, Artificial Sequence
  Description of Artificial Sequence:  Enzymatic Nucleic acid
  misc_feature (31)..(31): n stands for inosine
caugaucacugaugaggccguuaggccgaanuagacau

SEQ ID NO: 5295 - RNA, 38 nt, Artificial Sequence
  Description of Artificial Sequence:  Enzymatic Nucleic acid
  misc_feature (31)..(31): n stands for inosine
cuugaccacugaugaggccguuaggccgaanaucaugu

SEQ ID NO: 5296 - RNA, 38 nt, Artificial Sequence
  Description of Artificial Sequence:  Enzymatic Nucleic acid
  misc_feature (31)..(31): n stands for inosine
ccagcacucugaugaggccguuaggccgaanaccauga

SEQ ID NO: 5297 - RNA, 38 nt, Artificial Sequence
  Description of Artificial Sequence:  Enzymatic Nucleic acid
  misc_feature (31)..(31): n stands for inosine
uaucaucccugaugaggccguuaggccgaancacuuga

SEQ ID NO: 5298 - RNA, 38 nt, Artificial Sequence
  Description of Artificial Sequence:  Enzymatic Nucleic acid
  misc_feature (31)..(31): n stands for inosine
cgacuauccugaugaggccguuaggccgaancgucuau

SEQ ID NO: 5299 - RNA, 38 nt, Artificial Sequence
  Description of Artificial Sequence:  Enzymatic Nucleic acid
  misc_feature (31)..(31): n stands for inosine
gaacuuugcugaugaggccguuaggccgaancgacuau

SEQ ID NO: 5300 - RNA, 38 nt, Artificial Sequence
  Description of Artificial Sequence:  Enzymatic Nucleic acid
  misc_feature (31)..(31): n stands for inosine
ggaacuuucugaugaggccguuaggccgaangcgacua

SEQ ID NO: 5301 - RNA, 38 nt, Artificial Sequence
  Description of Artificial Sequence:  Enzymatic Nucleic acid
  misc_feature (31)..(31): n stands for inosine
cggaacuucugaugaggccguuaggccgaanggcgacu

SEQ ID NO: 5302 - RNA, 38 nt, Artificial Sequence
  Description of Artificial Sequence:  Enzymatic Nucleic acid
  misc_feature (31)..(31): n stands for inosine
caacucaccugaugaggccguuaggccgaanaacuuug

SEQ ID NO: 5303 - RNA, 38 nt, Artificial Sequence
  Description of Artificial Sequence:  Enzymatic Nucleic acid
  misc_feature (31)..(31): n stands for inosine
gaauucgacugaugaggccguuaggccgaanaucaacu

SEQ ID NO: 5304 - RNA, 38 nt, Artificial Sequence
  Description of Artificial Sequence:  Enzymatic Nucleic acid
  misc_feature (31)..(31): n stands for inosine
cauuuuggcugaugaggccguuaggccgaanaauucga

SEQ ID NO: 5305 - RNA, 38 nt, Artificial Sequence
  Description of Artificial Sequence:  Enzymatic Nucleic acid
  misc_feature (31)..(31): n stands for inosine
gccauuuucugaugaggccguuaggccgaanagaauuc

SEQ ID NO: 5306 - RNA, 38 nt, Artificial Sequence
  Description of Artificial Sequence:  Enzymatic Nucleic acid
  misc_feature (31)..(31): n stands for inosine
ggccauuucugaugaggccguuaggccgaangagaauu

SEQ ID NO: 5307 - RNA, 38 nt, Artificial Sequence
  Description of Artificial Sequence:  Enzymatic Nucleic acid
  misc_feature (31)..(31): n stands for inosine
gggucucgcugaugaggccguuaggccgaanccauuuu

SEQ ID NO: 5308 - RNA, 38 nt, Artificial Sequence
  Description of Artificial Sequence:  Enzymatic Nucleic acid
  misc_feature (31)..(31): n stands for inosine
ggggucuccugaugaggccguuaggccgaangccauuu

SEQ ID NO: 5309 - RNA, 38 nt, Artificial Sequence
  Description of Artificial Sequence:  Enzymatic Nucleic acid
  misc_feature (31)..(31): n stands for inosine
gcgcugggcugaugaggccguuaggccgaanucucggg

SEQ ID NO: 5310 - RNA, 38 nt, Artificial Sequence
  Description of Artificial Sequence:  Enzymatic Nucleic acid
  misc_feature (31)..(31): n stands for inosine
agcgcuggcugaugaggccguuaggccgaangucucgg

SEQ ID NO: 5311 - RNA, 38 nt, Artificial Sequence
  Description of Artificial Sequence:  Enzymatic Nucleic acid
  misc_feature (31)..(31): n stands for inosine
uagcgcugcugaugaggccguuaggccgaanggucucg

SEQ ID NO: 5312 - RNA, 38 nt, Artificial Sequence
  Description of Artificial Sequence:  Enzymatic Nucleic acid
  misc_feature (31)..(31): n stands for inosine
guagcgcucugaugaggccguuaggccgaangggucuc

SEQ ID NO: 5313 - RNA, 38 nt, Artificial Sequence
  Description of Artificial Sequence:  Enzymatic Nucleic acid
  misc_feature (31)..(31): n stands for inosine
gguagcgccugaugaggccguuaggccgaanggggucu

SEQ ID NO: 5314 - RNA, 38 nt, Artificial Sequence
  Description of Artificial Sequence:  Enzymatic Nucleic acid
  misc_feature (31)..(31): n stands for inosine
gacaaggucugaugaggccguuaggccgaancgcuggg

SEQ ID NO: 5315 - RNA, 38 nt, Artificial Sequence
  Description of Artificial Sequence:  Enzymatic Nucleic acid
  misc_feature (31)..(31): n stands for inosine
aaugacaacugaugaggccguuaggccgaanuagcgcu

SEQ ID NO: 5316 - RNA, 38 nt, Artificial Sequence
  Description of Artificial Sequence:  Enzymatic Nucleic acid
  misc_feature (31)..(31): n stands for inosine
gaaugacacugaugaggccguuaggccgaanguagcgc

SEQ ID NO: 5317 - RNA, 38 nt, Artificial Sequence
  Description of Artificial Sequence:  Enzymatic Nucleic acid
  misc_feature (31)..(31): n stands for inosine
ccccugaacugaugaggccguuaggccgaanacaaggu

SEQ ID NO: 5318 - RNA, 38 nt, Artificial Sequence
  Description of Artificial Sequence:  Enzymatic Nucleic acid
  misc_feature (31)..(31): n stands for inosine
cauccccccugaugaggccguuaggccgaanaaugaca

SEQ ID NO: 5319 - RNA, 38 nt, Artificial Sequence
  Description of Artificial Sequence:  Enzymatic Nucleic acid
  misc_feature (31)..(31): n stands for inosine
uuggcaaacugaugaggccguuaggccgaancauucuu

SEQ ID NO: 5320 - RNA, 38 nt, Artificial Sequence
  Description of Artificial Sequence:  Enzymatic Nucleic acid
  misc_feature (31)..(31): n stands for inosine
uaggacuucugaugaggccguuaggccgaancaaaugc

SEQ ID NO: 5321 - RNA, 38 nt, Artificial Sequence
  Description of Artificial Sequence:  Enzymatic Nucleic acid
  misc_feature (31)..(31): n stands for inosine
guaggacucugaugaggccguuaggccgaangcaaaug

SEQ ID NO: 5322 - RNA, 38 nt, Artificial Sequence
  Description of Artificial Sequence:  Enzymatic Nucleic acid
  misc_feature (31)..(31): n stands for inosine
agucuguacugaugaggccguuaggccgaanacuuggc

SEQ ID NO: 5323 - RNA, 38 nt, Artificial Sequence
  Description of Artificial Sequence:  Enzymatic Nucleic acid
  misc_feature (31)..(31): n stands for inosine
gagucugucugaugaggccguuaggccgaangacuugg

SEQ ID NO: 5324 - RNA, 38 nt, Artificial Sequence
  Description of Artificial Sequence:  Enzymatic Nucleic acid
  misc_feature (31)..(31): n stands for inosine
uuggaguccugaugaggccguuaggccgaanuaggacu

SEQ ID NO: 5325 - RNA, 38 nt, Artificial Sequence
  Description of Artificial Sequence:  Enzymatic Nucleic acid
  misc_feature (31)..(31): n stands for inosine
gaaguuggcugaugaggccguuaggccgaanucuguag

SEQ ID NO: 5326 - RNA, 38 nt, Artificial Sequence
  Description of Artificial Sequence:  Enzymatic Nucleic acid
  misc_feature (31)..(31): n stands for inosine
uagaaguucugaugaggccguuaggccgaanagucugu

SEQ ID NO: 5327 - RNA, 38 nt, Artificial Sequence
  Description of Artificial Sequence:  Enzymatic Nucleic acid
  misc_feature (31)..(31): n stands for inosine
guagaagucugaugaggccguuaggccgaangagucug

SEQ ID NO: 5328 - RNA, 38 nt, Artificial Sequence
  Description of Artificial Sequence:  Enzymatic Nucleic acid
  misc_feature (31)..(31): n stands for inosine
acgguagacugaugaggccguuaggccgaanuuggagu

SEQ ID NO: 5329 - RNA, 38 nt, Artificial Sequence
  Description of Artificial Sequence:  Enzymatic Nucleic acid
  misc_feature (31)..(31): n stands for inosine
ggcacggucugaugaggccguuaggccgaanaaguugg

SEQ ID NO: 5330 - RNA, 38 nt, Artificial Sequence
  Description of Artificial Sequence:  Enzymatic Nucleic acid
  misc_feature (31)..(31): n stands for inosine
cagggcaccugaugaggccguuaggccgaanuagaagu

SEQ ID NO: 5331 - RNA, 38 nt, Artificial Sequence
  Description of Artificial Sequence:  Enzymatic Nucleic acid
  misc_feature (31)..(31): n stands for inosine
uccaucagcugaugaggccguuaggccgaancacggua

SEQ ID NO: 5332 - RNA, 38 nt, Artificial Sequence
  Description of Artificial Sequence:  Enzymatic Nucleic acid
  misc_feature (31)..(31): n stands for inosine
auccaucacugaugaggccguuaggccgaangcacggu

SEQ ID NO: 5333 - RNA, 38 nt, Artificial Sequence
  Description of Artificial Sequence:  Enzymatic Nucleic acid
  misc_feature (31)..(31): n stands for inosine
cauccauccugaugaggccguuaggccgaanggcacgg

SEQ ID NO: 5334 - RNA, 38 nt, Artificial Sequence
  Description of Artificial Sequence:  Enzymatic Nucleic acid
  misc_feature (31)..(31): n stands for inosine
gucguccacugaugaggccguuaggccgaanucuucuu

SEQ ID NO: 5335 - RNA, 38 nt, Artificial Sequence
  Description of Artificial Sequence:  Enzymatic Nucleic acid
  misc_feature (31)..(31): n stands for inosine
uacucguccugaugaggccguuaggccgaancauccac

SEQ ID NO: 5336 - RNA, 38 nt, Artificial Sequence
  Description of Artificial Sequence:  Enzymatic Nucleic acid
  misc_feature (31)..(31): n stands for inosine
ugggaugacugaugaggccguuaggccgaanuacucgu

SEQ ID NO: 5337 - RNA, 38 nt, Artificial Sequence
  Description of Artificial Sequence:  Enzymatic Nucleic acid
  misc_feature (31)..(31): n stands for inosine
gugggaugcugaugaggccguuaggccgaanguacucg

SEQ ID NO: 5338 - RNA, 38 nt, Artificial Sequence
  Description of Artificial Sequence:  Enzymatic Nucleic acid
  misc_feature (31)..(31): n stands for inosine
cugugggacugaugaggccguuaggccgaanagguacu

SEQ ID NO: 5339 - RNA, 38 nt, Artificial Sequence
  Description of Artificial Sequence:  Enzymatic Nucleic acid
  misc_feature (31)..(31): n stands for inosine
cugcugugcugaugaggccguuaggccgaanaugaggu

SEQ ID NO: 5340 - RNA, 38 nt, Artificial Sequence
  Description of Artificial Sequence:  Enzymatic Nucleic acid
  misc_feature (31)..(31): n stands for inosine
ccugcugucugaugaggccguuaggccgaangaugagg

SEQ ID NO: 5341 - RNA, 38 nt, Artificial Sequence
  Description of Artificial Sequence:  Enzymatic Nucleic acid
  misc_feature (31)..(31): n stands for inosine
cccugcugcugaugaggccguuaggccgaanggaugag

SEQ ID NO: 5342 - RNA, 38 nt, Artificial Sequence
  Description of Artificial Sequence:  Enzymatic Nucleic acid
  misc_feature (31)..(31): n stands for inosine
agcccugccugaugaggccguuaggccgaanugggaug

SEQ ID NO: 5343 - RNA, 38 nt, Artificial Sequence
  Description of Artificial Sequence:  Enzymatic Nucleic acid
  misc_feature (31)..(31): n stands for inosine
agaagccccugaugaggccguuaggccgaancuguggg

SEQ ID NO: 5344 - RNA, 38 nt, Artificial Sequence
  Description of Artificial Sequence:  Enzymatic Nucleic acid
  misc_feature (31)..(31): n stands for inosine
gcugaagacugaugaggccguuaggccgaancccugcu

SEQ ID NO: 5345 - RNA, 38 nt, Artificial Sequence
  Description of Artificial Sequence:  Enzymatic Nucleic acid
  misc_feature (31)..(31): n stands for inosine
gcugcugacugaugaggccguuaggccgaanaagcccu

SEQ ID NO: 5346 - RNA, 38 nt, Artificial Sequence
  Description of Artificial Sequence:  Enzymatic Nucleic acid
  misc_feature (31)..(31): n stands for inosine
ggggcugccugaugaggccguuaggccgaanaagaagc

SEQ ID NO: 5347 - RNA, 38 nt, Artificial Sequence
  Description of Artificial Sequence:  Enzymatic Nucleic acid
  misc_feature (31)..(31): n stands for inosine
ggaggggccugaugaggccguuaggccgaancugaaga

SEQ ID NO: 5348 - RNA, 38 nt, Artificial Sequence
  Description of Artificial Sequence:  Enzymatic Nucleic acid
  misc_feature (31)..(31): n stands for inosine
cguggaggcugaugaggccguuaggccgaancugcuga

SEQ ID NO: 5349 - RNA, 38 nt, Artificial Sequence
  Description of Artificial Sequence:  Enzymatic Nucleic acid
  misc_feature (31)..(31): n stands for inosine
acguggagcugaugaggccguuaggccgaangcugcug

SEQ ID NO: 5350 - RNA, 38 nt, Artificial Sequence
  Description of Artificial Sequence:  Enzymatic Nucleic acid
  misc_feature (31)..(31): n stands for inosine
gacguggacugaugaggccguuaggccgaanggcugcu

SEQ ID NO: 5351 - RNA, 38 nt, Artificial Sequence
  Description of Artificial Sequence:  Enzymatic Nucleic acid
  misc_feature (31)..(31): n stands for inosine
ugacguggcugaugaggccguuaggccgaangggcugc

SEQ ID NO: 5352 - RNA, 38 nt, Artificial Sequence
  Description of Artificial Sequence:  Enzymatic Nucleic acid
  misc_feature (31)..(31): n stands for inosine
cgugacgucugaugaggccguuaggccgaanaggggcu

SEQ ID NO: 5353 - RNA, 38 nt, Artificial Sequence
  Description of Artificial Sequence:  Enzymatic Nucleic acid
  misc_feature (31)..(31): n stands for inosine
ccgugacgcugaugaggccguuaggccgaangaggggc

SEQ ID NO: 5354 - RNA, 38 nt, Artificial Sequence
  Description of Artificial Sequence:  Enzymatic Nucleic acid
  misc_feature (31)..(31): n stands for inosine
ggaguccgcugaugaggccguuaggccgaanacgugga

SEQ ID NO: 5355 - RNA, 38 nt, Artificial Sequence
  Description of Artificial Sequence:  Enzymatic Nucleic acid
  misc_feature (31)..(31): n stands for inosine
aggaggggcugaugaggccguuaggccgaanuccguga

SEQ ID NO: 5356 - RNA, 38 nt, Artificial Sequence
  Description of Artificial Sequence:  Enzymatic Nucleic acid
  misc_feature (31)..(31): n stands for inosine
ucaggaggcugaugaggccguuaggccgaanaguccgu

SEQ ID NO: 5357 - RNA, 38 nt, Artificial Sequence
  Description of Artificial Sequence:  Enzymatic Nucleic acid
  misc_feature (31)..(31): n stands for inosine
cucaggagcugaugaggccguuaggccgaangaguccg

SEQ ID NO: 5358 - RNA, 38 nt, Artificial Sequence
  Description of Artificial Sequence:  Enzymatic Nucleic acid
  misc_feature (31)..(31): n stands for inosine
gcucaggacugaugaggccguuaggccgaanggagucc

SEQ ID NO: 5359 - RNA, 38 nt, Artificial Sequence
  Description of Artificial Sequence:  Enzymatic Nucleic acid
  misc_feature (31)..(31): n stands for inosine
agcucaggcugaugaggccguuaggccgaangggaguc

SEQ ID NO: 5360 - RNA, 38 nt, Artificial Sequence
  Description of Artificial Sequence:  Enzymatic Nucleic acid
  misc_feature (31)..(31): n stands for inosine
agagcucacugaugaggccguuaggccgaanaggggag

SEQ ID NO: 5361 - RNA, 38 nt, Artificial Sequence
  Description of Artificial Sequence:  Enzymatic Nucleic acid
  misc_feature (31)..(31): n stands for inosine
gagagcuccugaugaggccguuaggccgaangagggga

SEQ ID NO: 5362 - RNA, 38 nt, Artificial Sequence
  Description of Artificial Sequence:  Enzymatic Nucleic acid
  misc_feature (31)..(31): n stands for inosine
acucagagcugaugaggccguuaggccgaancucagga

SEQ ID NO: 5363 - RNA, 38 nt, Artificial Sequence
  Description of Artificial Sequence:  Enzymatic Nucleic acid
  misc_feature (31)..(31): n stands for inosine
gcacucagcugaugaggccguuaggccgaanagcucag

SEQ ID NO: 5364 - RNA, 38 nt, Artificial Sequence
  Description of Artificial Sequence:  Enzymatic Nucleic acid
  misc_feature (31)..(31): n stands for inosine
uugcacuccugaugaggccguuaggccgaanagagcuc

SEQ ID NO: 5365 - RNA, 38 nt, Artificial Sequence
  Description of Artificial Sequence:  Enzymatic Nucleic acid
  misc_feature (31)..(31): n stands for inosine
uugcuggucugaugaggccguuaggccgaancacucag

SEQ ID NO: 5366 - RNA, 38 nt, Artificial Sequence
  Description of Artificial Sequence:  Enzymatic Nucleic acid
  misc_feature (31)..(31): n stands for inosine
uuguugcucugaugaggccguuaggccgaanuugcacu

SEQ ID NO: 5367 - RNA, 38 nt, Artificial Sequence
  Description of Artificial Sequence:  Enzymatic Nucleic acid
  misc_feature (31)..(31): n stands for inosine
auuguugccugaugaggccguuaggccgaanguugcac

SEQ ID NO: 5368 - RNA, 38 nt, Artificial Sequence
  Description of Artificial Sequence:  Enzymatic Nucleic acid
  misc_feature (31)..(31): n stands for inosine
ggaauugucugaugaggccguuaggccgaancugguug

SEQ ID NO: 5369 - RNA, 38 nt, Artificial Sequence
  Description of Artificial Sequence:  Enzymatic Nucleic acid
  misc_feature (31)..(31): n stands for inosine
gguggaaucugaugaggccguuaggccgaanuugcugg

SEQ ID NO: 5370 - RNA, 38 nt, Artificial Sequence
  Description of Artificial Sequence:  Enzymatic Nucleic acid
  misc_feature (31)..(31): n stands for inosine
gccacggucugaugaggccguuaggccgaanaauuguu

SEQ ID NO: 5371 - RNA, 38 nt, Artificial Sequence
  Description of Artificial Sequence:  Enzymatic Nucleic acid
  misc_feature (31)..(31): n stands for inosine
agccacggcugaugaggccguuaggccgaangaauugu

SEQ ID NO: 5372 - RNA, 38 nt, Artificial Sequence
  Description of Artificial Sequence:  Enzymatic Nucleic acid
  misc_feature (31)..(31): n stands for inosine
caagccaccugaugaggccguuaggccgaanuggaauu

SEQ ID NO: 5373 - RNA, 38 nt, Artificial Sequence
  Description of Artificial Sequence:  Enzymatic Nucleic acid
  misc_feature (31)..(31): n stands for inosine
ucaaugcacugaugaggccguuaggccgaanccacggu

SEQ ID NO: 5374 - RNA, 38 nt, Artificial Sequence
  Description of Artificial Sequence:  Enzymatic Nucleic acid
  misc_feature (31)..(31): n stands for inosine
ucuaucaacugaugaggccguuaggccgaancaagcca

SEQ ID NO: 5375 - RNA, 38 nt, Artificial Sequence
  Description of Artificial Sequence:  Enzymatic Nucleic acid
  misc_feature (31)..(31): n stands for inosine
agcuuugccugaugaggccguuaggccgaancccauuu

SEQ ID NO: 5376 - RNA, 38 nt, Artificial Sequence
  Description of Artificial Sequence:  Enzymatic Nucleic acid
  misc_feature (31)..(31): n stands for inosine
gacagcuucugaugaggccguuaggccgaancagccca

SEQ ID NO: 5377 - RNA, 38 nt, Artificial Sequence
  Description of Artificial Sequence:  Enzymatic Nucleic acid
  misc_feature (31)..(31): n stands for inosine
gaugggaccugaugaggccguuaggccgaancuuugca

SEQ ID NO: 5378 - RNA, 38 nt, Artificial Sequence
  Description of Artificial Sequence:  Enzymatic Nucleic acid
  misc_feature (31)..(31): n stands for inosine
ccuugaugcugaugaggccguuaggccgaanacagcuu

SEQ ID NO: 5379 - RNA, 38 nt, Artificial Sequence
  Description of Artificial Sequence:  Enzymatic Nucleic acid
  misc_feature (31)..(31): n stands for inosine
uccuugaucugaugaggccguuaggccgaangacagcu

SEQ ID NO: 5380 - RNA, 38 nt, Artificial Sequence
  Description of Artificial Sequence:  Enzymatic Nucleic acid
  misc_feature (31)..(31): n stands for inosine
uuccuugacugaugaggccguuaggccgaanggacagc

SEQ ID NO: 5381 - RNA, 38 nt, Artificial Sequence
  Description of Artificial Sequence:  Enzymatic Nucleic acid
  misc_feature (31)..(31): n stands for inosine
gucuuccucugaugaggccguuaggccgaanaugggac

SEQ ID NO: 5382 - RNA, 38 nt, Artificial Sequence
  Description of Artificial Sequence:  Enzymatic Nucleic acid
  misc_feature (31)..(31): n stands for inosine
caagaagccugaugaggccguuaggccgaanucuuccu

SEQ ID NO: 5383 - RNA, 38 nt, Artificial Sequence
  Description of Artificial Sequence:  Enzymatic Nucleic acid
  misc_feature (31)..(31): n stands for inosine
cugcaagacugaugaggccguuaggccgaancugucuu

SEQ ID NO: 5384 - RNA, 38 nt, Artificial Sequence
  Description of Artificial Sequence:  Enzymatic Nucleic acid
  misc_feature (31)..(31): n stands for inosine
ucgcugcacugaugaggccguuaggccgaanaagcugu

SEQ ID NO: 5385 - RNA, 38 nt, Artificial Sequence
  Description of Artificial Sequence:  Enzymatic Nucleic acid
  misc_feature (31)..(31): n stands for inosine
uguaucgccugaugaggccguuaggccgaancaagaag

SEQ ID NO: 5386 - RNA, 38 nt, Artificial Sequence
  Description of Artificial Sequence:  Enzymatic Nucleic acid
  misc_feature (31)..(31): n stands for inosine
gucugagccugaugaggccguuaggccgaanuaucgcu

SEQ ID NO: 5387 - RNA, 38 nt, Artificial Sequence
  Description of Artificial Sequence:  Enzymatic Nucleic acid
  misc_feature (31)..(31): n stands for inosine
ggggucugcugaugaggccguuaggccgaancuguauc

SEQ ID NO: 5388 - RNA, 38 nt, Artificial Sequence
  Description of Artificial Sequence:  Enzymatic Nucleic acid
  misc_feature (31)..(31): n stands for inosine
gugggguccugaugaggccguuaggccgaanagcugua

SEQ ID NO: 5389 - RNA, 38 nt, Artificial Sequence
  Description of Artificial Sequence:  Enzymatic Nucleic acid
  misc_feature (31)..(31): n stands for inosine
gccuguggcugaugaggccguuaggccgaanucugagc

SEQ ID NO: 5390 - RNA, 38 nt, Artificial Sequence
  Description of Artificial Sequence:  Enzymatic Nucleic acid
  misc_feature (31)..(31): n stands for inosine
cgccugugcugaugaggccguuaggccgaangucugag

SEQ ID NO: 5391 - RNA, 38 nt, Artificial Sequence
  Description of Artificial Sequence:  Enzymatic Nucleic acid
  misc_feature (31)..(31): n stands for inosine
gcgccugucugaugaggccguuaggccgaanggucuga

SEQ ID NO: 5392 - RNA, 38 nt, Artificial Sequence
  Description of Artificial Sequence:  Enzymatic Nucleic acid
  misc_feature (31)..(31): n stands for inosine
ggcgccugcugaugaggccguuaggccgaangggucug

SEQ ID NO: 5393 - RNA, 38 nt, Artificial Sequence
  Description of Artificial Sequence:  Enzymatic Nucleic acid
  misc_feature (31)..(31): n stands for inosine
aaggcgcccugaugaggccguuaggccgaanugggguc

SEQ ID NO: 5394 - RNA, 38 nt, Artificial Sequence
  Description of Artificial Sequence:  Enzymatic Nucleic acid
  misc_feature (31)..(31): n stands for inosine
ucagucaacugaugaggccguuaggccgaancgccugu

SEQ ID NO: 5395 - RNA, 38 nt, Artificial Sequence
  Description of Artificial Sequence:  Enzymatic Nucleic acid
  misc_feature (31)..(31): n stands for inosine
cucagucacugaugaggccguuaggccgaangcgccug

SEQ ID NO: 5396 - RNA, 38 nt, Artificial Sequence
  Description of Artificial Sequence:  Enzymatic Nucleic acid
  misc_feature (31)..(31): n stands for inosine
cuguccuccugaugaggccguuaggccgaanucaaggc

SEQ ID NO: 5397 - RNA, 38 nt, Artificial Sequence
  Description of Artificial Sequence:  Enzymatic Nucleic acid
  misc_feature (31)..(31): n stands for inosine
gucuaugccugaugaggccguuaggccgaanuccucag

SEQ ID NO: 5398 - RNA, 38 nt, Artificial Sequence
  Description of Artificial Sequence:  Enzymatic Nucleic acid
  misc_feature (31)..(31): n stands for inosine
gucgucuacugaugaggccguuaggccgaancuguccu

SEQ ID NO: 5399 - RNA, 38 nt, Artificial Sequence
  Description of Artificial Sequence:  Enzymatic Nucleic acid
  misc_feature (31)..(31): n stands for inosine
gaggaaggcugaugaggccguuaggccgaanucgucua

SEQ ID NO: 5400 - RNA, 38 nt, Artificial Sequence
  Description of Artificial Sequence:  Enzymatic Nucleic acid
  misc_feature (31)..(31): n stands for inosine
gggaggaacugaugaggccguuaggccgaanugucguc

SEQ ID NO: 5401 - RNA, 38 nt, Artificial Sequence
  Description of Artificial Sequence:  Enzymatic Nucleic acid
  misc_feature (31)..(31): n stands for inosine
ugggaggacugaugaggccguuaggccgaangugucgu

SEQ ID NO: 5402 - RNA, 38 nt, Artificial Sequence
  Description of Artificial Sequence:  Enzymatic Nucleic acid
  misc_feature (31)..(31): n stands for inosine
cacugggacugaugaggccguuaggccgaanaaggugu

SEQ ID NO: 5403 - RNA, 38 nt, Artificial Sequence
  Description of Artificial Sequence:  Enzymatic Nucleic acid
  misc_feature (31)..(31): n stands for inosine
gcacugggcugaugaggccguuaggccgaangaaggug

SEQ ID NO: 5404 - RNA, 38 nt, Artificial Sequence
  Description of Artificial Sequence:  Enzymatic Nucleic acid
  misc_feature (31)..(31): n stands for inosine
aggcacugcugaugaggccguuaggccgaanaggaagg

SEQ ID NO: 5405 - RNA, 38 nt, Artificial Sequence
  Description of Artificial Sequence:  Enzymatic Nucleic acid
  misc_feature (31)..(31): n stands for inosine
caggcacucugaugaggccguuaggccgaangaggaag

SEQ ID NO: 5406 - RNA, 38 nt, Artificial Sequence
  Description of Artificial Sequence:  Enzymatic Nucleic acid
  misc_feature (31)..(31): n stands for inosine
ucaggcaccugaugaggccguuaggccgaanggaggaa

SEQ ID NO: 5407 - RNA, 38 nt, Artificial Sequence
  Description of Artificial Sequence:  Enzymatic Nucleic acid
  misc_feature (31)..(31): n stands for inosine
uguauucacugaugaggccguuaggccgaancacuggg

SEQ ID NO: 5408 - RNA, 38 nt, Artificial Sequence
  Description of Artificial Sequence:  Enzymatic Nucleic acid
  misc_feature (31)..(31): n stands for inosine
auguauuccugaugaggccguuaggccgaangcacugg

SEQ ID NO: 5409 - RNA, 38 nt, Artificial Sequence
  Description of Artificial Sequence:  Enzymatic Nucleic acid
  misc_feature (31)..(31): n stands for inosine
cugguuuacugaugaggccguuaggccgaanuauucag

SEQ ID NO: 5410 - RNA, 38 nt, Artificial Sequence
  Description of Artificial Sequence:  Enzymatic Nucleic acid
  misc_feature (31)..(31): n stands for inosine
aacggacucugaugaggccguuaggccgaanuuuaugu

SEQ ID NO: 5411 - RNA, 38 nt, Artificial Sequence
  Description of Artificial Sequence:  Enzymatic Nucleic acid
  misc_feature (31)..(31): n stands for inosine
gaacggaccugaugaggccguuaggccgaanguuuaug

SEQ ID NO: 5412 - RNA, 38 nt, Artificial Sequence
  Description of Artificial Sequence:  Enzymatic Nucleic acid
  misc_feature (31)..(31): n stands for inosine
uugggaaccugaugaggccguuaggccgaanacugguu

SEQ ID NO: 5413 - RNA, 38 nt, Artificial Sequence
  Description of Artificial Sequence:  Enzymatic Nucleic acid
  misc_feature (31)..(31): n stands for inosine
gccuuuugcugaugaggccguuaggccgaanaacggac

SEQ ID NO: 5414 - RNA, 38 nt, Artificial Sequence
  Description of Artificial Sequence:  Enzymatic Nucleic acid
  misc_feature (31)..(31): n stands for inosine
ggccuuuucugaugaggccguuaggccgaangaacgga

SEQ ID NO: 5415 - RNA, 38 nt, Artificial Sequence
  Description of Artificial Sequence:  Enzymatic Nucleic acid
  misc_feature (31)..(31): n stands for inosine
gggccuuucugaugaggccguuaggccgaanggaacgg

SEQ ID NO: 5416 - RNA, 38 nt, Artificial Sequence
  Description of Artificial Sequence:  Enzymatic Nucleic acid
  misc_feature (31)..(31): n stands for inosine
agccagcgcugaugaggccguuaggccgaanccuuuug

SEQ ID NO: 5417 - RNA, 38 nt, Artificial Sequence
  Description of Artificial Sequence:  Enzymatic Nucleic acid
  misc_feature (31)..(31): n stands for inosine
gagccagccugaugaggccguuaggccgaangccuuuu

SEQ ID NO: 5418 - RNA, 38 nt, Artificial Sequence
  Description of Artificial Sequence:  Enzymatic Nucleic acid
  misc_feature (31)..(31): n stands for inosine
acagagcccugaugaggccguuaggccgaancgggccu

SEQ ID NO: 5419 - RNA, 38 nt, Artificial Sequence
  Description of Artificial Sequence:  Enzymatic Nucleic acid
  misc_feature (31)..(31): n stands for inosine
cugcacagcugaugaggccguuaggccgaanccagcgg

SEQ ID NO: 5420 - RNA, 38 nt, Artificial Sequence
  Description of Artificial Sequence:  Enzymatic Nucleic acid
  misc_feature (31)..(31): n stands for inosine
uucugcaccugaugaggccguuaggccgaanagccagc

SEQ ID NO: 5421 - RNA, 38 nt, Artificial Sequence
  Description of Artificial Sequence:  Enzymatic Nucleic acid
  misc_feature (31)..(31): n stands for inosine
caggauuccugaugaggccguuaggccgaancacagag

SEQ ID NO: 5422 - RNA, 38 nt, Artificial Sequence
  Description of Artificial Sequence:  Enzymatic Nucleic acid
  misc_feature (31)..(31): n stands for inosine
gauagacacugaugaggccguuaggccgaanauucugc

SEQ ID NO: 5423 - RNA, 38 nt, Artificial Sequence
  Description of Artificial Sequence:  Enzymatic Nucleic acid
  misc_feature (31)..(31): n stands for inosine
ugauagaccugaugaggccguuaggccgaangauucug

SEQ ID NO: 5424 - RNA, 38 nt, Artificial Sequence
  Description of Artificial Sequence:  Enzymatic Nucleic acid
  misc_feature (31)..(31): n stands for inosine
auugugaucugaugaggccguuaggccgaanacaggau

SEQ ID NO: 5425 - RNA, 38 nt, Artificial Sequence
  Description of Artificial Sequence:  Enzymatic Nucleic acid
  misc_feature (31)..(31): n stands for inosine
gcugauugcugaugaggccguuaggccgaanauagaca

SEQ ID NO: 5426 - RNA, 38 nt, Artificial Sequence
  Description of Artificial Sequence:  Enzymatic Nucleic acid
  misc_feature (31)..(31): n stands for inosine
aggcugaucugaugaggccguuaggccgaanugauaga

SEQ ID NO: 5427 - RNA, 38 nt, Artificial Sequence
  Description of Artificial Sequence:  Enzymatic Nucleic acid
  misc_feature (31)..(31): n stands for inosine
ucagaggccugaugaggccguuaggccgaanauuguga

SEQ ID NO: 5428 - RNA, 38 nt, Artificial Sequence
  Description of Artificial Sequence:  Enzymatic Nucleic acid
  misc_feature (31)..(31): n stands for inosine
gguucagacugaugaggccguuaggccgaancugauug

SEQ ID NO: 5429 - RNA, 38 nt, Artificial Sequence
  Description of Artificial Sequence:  Enzymatic Nucleic acid
  misc_feature (31)..(31): n stands for inosine
ggguucagcugaugaggccguuaggccgaangcugauu

SEQ ID NO: 5430 - RNA, 38 nt, Artificial Sequence
  Description of Artificial Sequence:  Enzymatic Nucleic acid
  misc_feature (31)..(31): n stands for inosine
cgggguuccugaugaggccguuaggccgaanaggcuga

SEQ ID NO: 5431 - RNA, 38 nt, Artificial Sequence
  Description of Artificial Sequence:  Enzymatic Nucleic acid
  misc_feature (31)..(31): n stands for inosine
gggcgcggcugaugaggccguuaggccgaanuucagag

SEQ ID NO: 5432 - RNA, 38 nt, Artificial Sequence
  Description of Artificial Sequence:  Enzymatic Nucleic acid
  misc_feature (31)..(31): n stands for inosine
ugggcgcgcugaugaggccguuaggccgaanguucaga

SEQ ID NO: 5433 - RNA, 38 nt, Artificial Sequence
  Description of Artificial Sequence:  Enzymatic Nucleic acid
  misc_feature (31)..(31): n stands for inosine
cugggcgccugaugaggccguuaggccgaangguucag

SEQ ID NO: 5434 - RNA, 38 nt, Artificial Sequence
  Description of Artificial Sequence:  Enzymatic Nucleic acid
  misc_feature (31)..(31): n stands for inosine
cucugcugcugaugaggccguuaggccgaancgcgggg

SEQ ID NO: 5435 - RNA, 38 nt, Artificial Sequence
  Description of Artificial Sequence:  Enzymatic Nucleic acid
  misc_feature (31)..(31): n stands for inosine
ucucugcucugaugaggccguuaggccgaangcgcggg

SEQ ID NO: 5436 - RNA, 38 nt, Artificial Sequence
  Description of Artificial Sequence:  Enzymatic Nucleic acid
  misc_feature (31)..(31): n stands for inosine
gucucugccugaugaggccguuaggccgaanggcgcgg

SEQ ID NO: 5437 - RNA, 38 nt, Artificial Sequence
  Description of Artificial Sequence:  Enzymatic Nucleic acid
  misc_feature (31)..(31): n stands for inosine
ugggucuccugaugaggccguuaggccgaancugggcg

SEQ ID NO: 5438 - RNA, 38 nt, Artificial Sequence
  Description of Artificial Sequence:  Enzymatic Nucleic acid
  misc_feature (31)..(31): n stands for inosine
guagugugcugaugaggccguuaggccgaanucucugc

SEQ ID NO: 5439 - RNA, 38 nt, Artificial Sequence
  Description of Artificial Sequence:  Enzymatic Nucleic acid
  misc_feature (31)..(31): n stands for inosine
gguagugucugaugaggccguuaggccgaangucucug

SEQ ID NO: 5440 - RNA, 38 nt, Artificial Sequence
  Description of Artificial Sequence:  Enzymatic Nucleic acid
  misc_feature (31)..(31): n stands for inosine
ugguagugcugaugaggccguuaggccgaanggucucu

SEQ ID NO: 5441 - RNA, 38 nt, Artificial Sequence
  Description of Artificial Sequence:  Enzymatic Nucleic acid
  misc_feature (31)..(31): n stands for inosine
ccugguagcugaugaggccguuaggccgaanugggucu

SEQ ID NO: 5442 - RNA, 38 nt, Artificial Sequence
  Description of Artificial Sequence:  Enzymatic Nucleic acid
  misc_feature (31)..(31): n stands for inosine
guccuggucugaugaggccguuaggccgaanugugggu

SEQ ID NO: 5443 - RNA, 38 nt, Artificial Sequence
  Description of Artificial Sequence:  Enzymatic Nucleic acid
  misc_feature (31)..(31): n stands for inosine
gggguccucugaugaggccguuaggccgaanuagugug

SEQ ID NO: 5444 - RNA, 38 nt, Artificial Sequence
  Description of Artificial Sequence:  Enzymatic Nucleic acid
  misc_feature (31)..(31): n stands for inosine
gggggucccugaugaggccguuaggccgaanguagugu

SEQ ID NO: 5445 - RNA, 38 nt, Artificial Sequence
  Description of Artificial Sequence:  Enzymatic Nucleic acid
  misc_feature (31)..(31): n stands for inosine
gcugugggcugaugaggccguuaggccgaanuccuggu

SEQ ID NO: 5446 - RNA, 38 nt, Artificial Sequence
  Description of Artificial Sequence:  Enzymatic Nucleic acid
  misc_feature (31)..(31): n stands for inosine
ugcuguggcugaugaggccguuaggccgaanguccugg

SEQ ID NO: 5447 - RNA, 38 nt, Artificial Sequence
  Description of Artificial Sequence:  Enzymatic Nucleic acid
  misc_feature (31)..(31): n stands for inosine
gugcugugcugaugaggccguuaggccgaangguccug

SEQ ID NO: 5448 - RNA, 38 nt, Artificial Sequence
  Description of Artificial Sequence:  Enzymatic Nucleic acid
  misc_feature (31)..(31): n stands for inosine
agugcugucugaugaggccguuaggccgaanggguccu

SEQ ID NO: 5449 - RNA, 38 nt, Artificial Sequence
  Description of Artificial Sequence:  Enzymatic Nucleic acid
  misc_feature (31)..(31): n stands for inosine
cagugcugcugaugaggccguuaggccgaanggggucc

SEQ ID NO: 5450 - RNA, 38 nt, Artificial Sequence
  Description of Artificial Sequence:  Enzymatic Nucleic acid
  misc_feature (31)..(31): n stands for inosine
ugcagugccugaugaggccguuaggccgaanugggggu

SEQ ID NO: 5451 - RNA, 38 nt, Artificial Sequence
  Description of Artificial Sequence:  Enzymatic Nucleic acid
  misc_feature (31)..(31): n stands for inosine
cacugcagcugaugaggccguuaggccgaancuguggg

SEQ ID NO: 5452 - RNA, 38 nt, Artificial Sequence
  Description of Artificial Sequence:  Enzymatic Nucleic acid
  misc_feature (31)..(31): n stands for inosine
cccacugccugaugaggccguuaggccgaanugcugug

SEQ ID NO: 5453 - RNA, 38 nt, Artificial Sequence
  Description of Artificial Sequence:  Enzymatic Nucleic acid
  misc_feature (31)..(31): n stands for inosine
uugcccaccugaugaggccguuaggccgaancagugcu

SEQ ID NO: 5454 - RNA, 38 nt, Artificial Sequence
  Description of Artificial Sequence:  Enzymatic Nucleic acid
  misc_feature (31)..(31): n stands for inosine
cucggggucugaugaggccguuaggccgaancccacug

SEQ ID NO: 5455 - RNA, 38 nt, Artificial Sequence
  Description of Artificial Sequence:  Enzymatic Nucleic acid
  misc_feature (31)..(31): n stands for inosine
auacucggcugaugaggccguuaggccgaanuugccca

SEQ ID NO: 5456 - RNA, 38 nt, Artificial Sequence
  Description of Artificial Sequence:  Enzymatic Nucleic acid
  misc_feature (31)..(31): n stands for inosine
gauacucgcugaugaggccguuaggccgaanguugccc

SEQ ID NO: 5457 - RNA, 38 nt, Artificial Sequence
  Description of Artificial Sequence:  Enzymatic Nucleic acid
  misc_feature (31)..(31): n stands for inosine
agauacuccugaugaggccguuaggccgaangguugcc

SEQ ID NO: 5458 - RNA, 38 nt, Artificial Sequence
  Description of Artificial Sequence:  Enzymatic Nucleic acid
  misc_feature (31)..(31): n stands for inosine
caguguugcugaugaggccguuaggccgaanauacucg

SEQ ID NO: 5459 - RNA, 38 nt, Artificial Sequence
  Description of Artificial Sequence:  Enzymatic Nucleic acid
  misc_feature (31)..(31): n stands for inosine
gacagugucugaugaggccguuaggccgaanagauacu

SEQ ID NO: 5460 - RNA, 38 nt, Artificial Sequence
  Description of Artificial Sequence:  Enzymatic Nucleic acid
  misc_feature (31)..(31): n stands for inosine
cuggacagcugaugaggccguuaggccgaanuugagau

SEQ ID NO: 5461 - RNA, 38 nt, Artificial Sequence
  Description of Artificial Sequence:  Enzymatic Nucleic acid
  misc_feature (31)..(31): n stands for inosine
ggcuggaccugaugaggccguuaggccgaanuguugag

SEQ ID NO: 5462 - RNA, 38 nt, Artificial Sequence
  Description of Artificial Sequence:  Enzymatic Nucleic acid
  misc_feature (31)..(31): n stands for inosine
ggugggcucugaugaggccguuaggccgaanacagugu

SEQ ID NO: 5463 - RNA, 38 nt, Artificial Sequence
  Description of Artificial Sequence:  Enzymatic Nucleic acid
  misc_feature (31)..(31): n stands for inosine
aggugggccugaugaggccguuaggccgaangacagug

SEQ ID NO: 5464 - RNA, 38 nt, Artificial Sequence
  Description of Artificial Sequence:  Enzymatic Nucleic acid
  misc_feature (31)..(31): n stands for inosine
cacaggugcugaugaggccguuaggccgaancuggaca

SEQ ID NO: 5465 - RNA, 38 nt, Artificial Sequence
  Description of Artificial Sequence:  Enzymatic Nucleic acid
  misc_feature (31)..(31): n stands for inosine
acacaggucugaugaggccguuaggccgaangcuggac

SEQ ID NO: 5466 - RNA, 38 nt, Artificial Sequence
  Description of Artificial Sequence:  Enzymatic Nucleic acid
  misc_feature (31)..(31): n stands for inosine
gacacaggcugaugaggccguuaggccgaanggcugga

SEQ ID NO: 5467 - RNA, 38 nt, Artificial Sequence
  Description of Artificial Sequence:  Enzymatic Nucleic acid
  misc_feature (31)..(31): n stands for inosine
uugacacacugaugaggccguuaggccgaanugggcug

SEQ ID NO: 5468 - RNA, 38 nt, Artificial Sequence
  Description of Artificial Sequence:  Enzymatic Nucleic acid
  misc_feature (31)..(31): n stands for inosine
guugacaccugaugaggccguuaggccgaangugggcu

SEQ ID NO: 5469 - RNA, 38 nt, Artificial Sequence
  Description of Artificial Sequence:  Enzymatic Nucleic acid
  misc_feature (31)..(31): n stands for inosine
ugugcugucugaugaggccguuaggccgaanacacagg

SEQ ID NO: 5470 - RNA, 38 nt, Artificial Sequence
  Description of Artificial Sequence:  Enzymatic Nucleic acid
  misc_feature (31)..(31): n stands for inosine
gaaugugccugaugaggccguuaggccgaanuugacac

SEQ ID NO: 5471 - RNA, 38 nt, Artificial Sequence
  Description of Artificial Sequence:  Enzymatic Nucleic acid
  misc_feature (31)..(31): n stands for inosine
gucgaaugcugaugaggccguuaggccgaancuguuga

SEQ ID NO: 5472 - RNA, 38 nt, Artificial Sequence
  Description of Artificial Sequence:  Enzymatic Nucleic acid
  misc_feature (31)..(31): n stands for inosine
cugucgaacugaugaggccguuaggccgaanugcuguu

SEQ ID NO: 5473 - RNA, 38 nt, Artificial Sequence
  Description of Artificial Sequence:  Enzymatic Nucleic acid
  misc_feature (31)..(31): n stands for inosine
ggcagggccugaugaggccguuaggccgaanucgaaug

SEQ ID NO: 5474 - RNA, 38 nt, Artificial Sequence
  Description of Artificial Sequence:  Enzymatic Nucleic acid
  misc_feature (31)..(31): n stands for inosine
gugggcagcugaugaggccguuaggccgaancugucga

SEQ ID NO: 5475 - RNA, 38 nt, Artificial Sequence
  Description of Artificial Sequence:  Enzymatic Nucleic acid
  misc_feature (31)..(31): n stands for inosine
agugggcacugaugaggccguuaggccgaangcugucg

SEQ ID NO: 5476 - RNA, 38 nt, Artificial Sequence
  Description of Artificial Sequence:  Enzymatic Nucleic acid
  misc_feature (31)..(31): n stands for inosine
cagugggccugaugaggccguuaggccgaanggcuguc

SEQ ID NO: 5477 - RNA, 38 nt, Artificial Sequence
  Description of Artificial Sequence:  Enzymatic Nucleic acid
  misc_feature (31)..(31): n stands for inosine
gcccagugcugaugaggccguuaggccgaancagggcu

SEQ ID NO: 5478 - RNA, 38 nt, Artificial Sequence
  Description of Artificial Sequence:  Enzymatic Nucleic acid
  misc_feature (31)..(31): n stands for inosine
ggcccagucugaugaggccguuaggccgaangcagggc

SEQ ID NO: 5479 - RNA, 38 nt, Artificial Sequence
  Description of Artificial Sequence:  Enzymatic Nucleic acid
  misc_feature (31)..(31): n stands for inosine
gggcccagcugaugaggccguuaggccgaanggcaggg

SEQ ID NO: 5480 - RNA, 38 nt, Artificial Sequence
  Description of Artificial Sequence:  Enzymatic Nucleic acid
  misc_feature (31)..(31): n stands for inosine
cugggccccugaugaggccguuaggccgaanugggcag

SEQ ID NO: 5481 - RNA, 38 nt, Artificial Sequence
  Description of Artificial Sequence:  Enzymatic Nucleic acid
  misc_feature (31)..(31): n stands for inosine
ccuuucugcugaugaggccguuaggccgaancccagug

SEQ ID NO: 5482 - RNA, 38 nt, Artificial Sequence
  Description of Artificial Sequence:  Enzymatic Nucleic acid
  misc_feature (31)..(31): n stands for inosine
gccuuucucugaugaggccguuaggccgaangcccagu

SEQ ID NO: 5483 - RNA, 38 nt, Artificial Sequence
  Description of Artificial Sequence:  Enzymatic Nucleic acid
  misc_feature (31)..(31): n stands for inosine
ugccuuuccugaugaggccguuaggccgaanggcccag

SEQ ID NO: 5484 - RNA, 38 nt, Artificial Sequence
  Description of Artificial Sequence:  Enzymatic Nucleic acid
  misc_feature (31)..(31): n stands for inosine
uugguggccugaugaggccguuaggccgaanccuuucu

SEQ ID NO: 5485 - RNA, 38 nt, Artificial Sequence
  Description of Artificial Sequence:  Enzymatic Nucleic acid
  misc_feature (31)..(31): n stands for inosine
aauuuggucugaugaggccguuaggccgaancugccuu

SEQ ID NO: 5486 - RNA, 38 nt, Artificial Sequence
  Description of Artificial Sequence:  Enzymatic Nucleic acid
  misc_feature (31)..(31): n stands for inosine
uaauuuggcugaugaggccguuaggccgaangcugccu

SEQ ID NO: 5487 - RNA, 38 nt, Artificial Sequence
  Description of Artificial Sequence:  Enzymatic Nucleic acid
  misc_feature (31)..(31): n stands for inosine
gcuaauuucugaugaggccguuaggccgaanuggcugc

SEQ ID NO: 5488 - RNA, 38 nt, Artificial Sequence
  Description of Artificial Sequence:  Enzymatic Nucleic acid
  misc_feature (31)..(31): n stands for inosine
ggcuaauucugaugaggccguuaggccgaanguggcug

SEQ ID NO: 5489 - RNA, 38 nt, Artificial Sequence
  Description of Artificial Sequence:  Enzymatic Nucleic acid
  misc_feature (31)..(31): n stands for inosine
guuguccacugaugaggccguuaggccgaancuaauuu

SEQ ID NO: 5490 - RNA, 38 nt, Artificial Sequence
  Description of Artificial Sequence:  Enzymatic Nucleic acid
  misc_feature (31)..(31): n stands for inosine
gguugucccugaugaggccguuaggccgaangcuaauu

SEQ ID NO: 5491 - RNA, 38 nt, Artificial Sequence
  Description of Artificial Sequence:  Enzymatic Nucleic acid
  misc_feature (31)..(31): n stands for inosine
gucagggucugaugaggccguuaggccgaanuccaggc

SEQ ID NO: 5492 - RNA, 38 nt, Artificial Sequence
  Description of Artificial Sequence:  Enzymatic Nucleic acid
  misc_feature (31)..(31): n stands for inosine
guagucagcugaugaggccguuaggccgaanuugucca

SEQ ID NO: 5493 - RNA, 38 nt, Artificial Sequence
  Description of Artificial Sequence:  Enzymatic Nucleic acid
  misc_feature (31)..(31): n stands for inosine
gguagucacugaugaggccguuaggccgaanguugucc

SEQ ID NO: 5494 - RNA, 38 nt, Artificial Sequence
  Description of Artificial Sequence:  Enzymatic Nucleic acid
  misc_feature (31)..(31): n stands for inosine
ugguaguccugaugaggccguuaggccgaangguuguc

SEQ ID NO: 5495 - RNA, 38 nt, Artificial Sequence
  Description of Artificial Sequence:  Enzymatic Nucleic acid
  misc_feature (31)..(31): n stands for inosine
cugcuggucugaugaggccguuaggccgaanucagggu

SEQ ID NO: 5496 - RNA, 38 nt, Artificial Sequence
  Description of Artificial Sequence:  Enzymatic Nucleic acid
  misc_feature (31)..(31): n stands for inosine
guccugcucugaugaggccguuaggccgaanuagucag

SEQ ID NO: 5497 - RNA, 38 nt, Artificial Sequence
  Description of Artificial Sequence:  Enzymatic Nucleic acid
  misc_feature (31)..(31): n stands for inosine
aguccugccugaugaggccguuaggccgaanguaguca

SEQ ID NO: 5498 - RNA, 38 nt, Artificial Sequence
  Description of Artificial Sequence:  Enzymatic Nucleic acid
  misc_feature (31)..(31): n stands for inosine
agaagucccugaugaggccguuaggccgaancugguag

SEQ ID NO: 5499 - RNA, 38 nt, Artificial Sequence
  Description of Artificial Sequence:  Enzymatic Nucleic acid
  misc_feature (31)..(31): n stands for inosine
gggaaagacugaugaggccguuaggccgaanuccugcu

SEQ ID NO: 5500 - RNA, 38 nt, Artificial Sequence
  Description of Artificial Sequence:  Enzymatic Nucleic acid
  misc_feature (31)..(31): n stands for inosine
cuugggaacugaugaggccguuaggccgaanaaguccu

SEQ ID NO: 5501 - RNA, 38 nt, Artificial Sequence
  Description of Artificial Sequence:  Enzymatic Nucleic acid
  misc_feature (31)..(31): n stands for inosine
cuuccuugcugaugaggccguuaggccgaanaaagaag

SEQ ID NO: 5502 - RNA, 38 nt, Artificial Sequence
  Description of Artificial Sequence:  Enzymatic Nucleic acid
  misc_feature (31)..(31): n stands for inosine
gcuuccuucugaugaggccguuaggccgaangaaagaa

SEQ ID NO: 5503 - RNA, 38 nt, Artificial Sequence
  Description of Artificial Sequence:  Enzymatic Nucleic acid
  misc_feature (31)..(31): n stands for inosine
ggcuuccucugaugaggccguuaggccgaanggaaaga

SEQ ID NO: 5504 - RNA, 38 nt, Artificial Sequence
  Description of Artificial Sequence:  Enzymatic Nucleic acid
  misc_feature (31)..(31): n stands for inosine
uuuggcuucugaugaggccguuaggccgaancuuccuu

SEQ ID NO: 5505 - RNA, 38 nt, Artificial Sequence
  Description of Artificial Sequence:  Enzymatic Nucleic acid
  misc_feature (31)..(31): n stands for inosine
auuuggcucugaugaggccguuaggccgaangcuuccu

SEQ ID NO: 5506 - RNA, 38 nt, Artificial Sequence
  Description of Artificial Sequence:  Enzymatic Nucleic acid
  misc_feature (31)..(31): n stands for inosine
ugccauuucugaugaggccguuaggccgaancuuggcu

SEQ ID NO: 5507 - RNA, 38 nt, Artificial Sequence
  Description of Artificial Sequence:  Enzymatic Nucleic acid
  misc_feature (31)..(31): n stands for inosine
augccauucugaugaggccguuaggccgaangcuuggc

SEQ ID NO: 5508 - RNA, 38 nt, Artificial Sequence
  Description of Artificial Sequence:  Enzymatic Nucleic acid
  misc_feature (31)..(31): n stands for inosine
cuuaaagacugaugaggccguuaggccgaanccauuug

SEQ ID NO: 5509 - RNA, 38 nt, Artificial Sequence
  Description of Artificial Sequence:  Enzymatic Nucleic acid
  misc_feature (31)..(31): n stands for inosine
gcccuuaacugaugaggccguuaggccgaanaugccau

SEQ ID NO: 5510 - RNA, 38 nt, Artificial Sequence
  Description of Artificial Sequence:  Enzymatic Nucleic acid
  misc_feature (31)..(31): n stands for inosine
agcuguggcugaugaggccguuaggccgaancccuuaa

SEQ ID NO: 5511 - RNA, 38 nt, Artificial Sequence
  Description of Artificial Sequence:  Enzymatic Nucleic acid
  misc_feature (31)..(31): n stands for inosine
ucagcugucugaugaggccguuaggccgaanagcccuu

SEQ ID NO: 5512 - RNA, 38 nt, Artificial Sequence
  Description of Artificial Sequence:  Enzymatic Nucleic acid
  misc_feature (31)..(31): n stands for inosine
uucagcugcugaugaggccguuaggccgaangagcccu

SEQ ID NO: 5513 - RNA, 38 nt, Artificial Sequence
  Description of Artificial Sequence:  Enzymatic Nucleic acid
  misc_feature (31)..(31): n stands for inosine
uuuucagccugaugaggccguuaggccgaanuggagcc

SEQ ID NO: 5514 - RNA, 38 nt, Artificial Sequence
  Description of Artificial Sequence:  Enzymatic Nucleic acid
  misc_feature (31)..(31): n stands for inosine
gcauuuuccugaugaggccguuaggccgaancugugga

SEQ ID NO: 5515 - RNA, 38 nt, Artificial Sequence
  Description of Artificial Sequence:  Enzymatic Nucleic acid
  misc_feature (31)..(31): n stands for inosine
agguauuccugaugaggccguuaggccgaancauuuuc

SEQ ID NO: 5516 - RNA, 38 nt, Artificial Sequence
  Description of Artificial Sequence:  Enzymatic Nucleic acid
  misc_feature (31)..(31): n stands for inosine
gacccuuacugaugaggccguuaggccgaanuauucug

SEQ ID NO: 5517 - RNA, 38 nt, Artificial Sequence
  Description of Artificial Sequence:  Enzymatic Nucleic acid
  misc_feature (31)..(31): n stands for inosine
cgacccuucugaugaggccguuaggccgaanguauucu

SEQ ID NO: 5518 - RNA, 38 nt, Artificial Sequence
  Description of Artificial Sequence:  Enzymatic Nucleic acid
  misc_feature (31)..(31): n stands for inosine
ugcuuugucugaugaggccguuaggccgaancgcgacc

SEQ ID NO: 5519 - RNA, 38 nt, Artificial Sequence
  Description of Artificial Sequence:  Enzymatic Nucleic acid
  misc_feature (31)..(31): n stands for inosine
cugcuuugcugaugaggccguuaggccgaangcgcgac

SEQ ID NO: 5520 - RNA, 38 nt, Artificial Sequence
  Description of Artificial Sequence:  Enzymatic Nucleic acid
  misc_feature (31)..(31): n stands for inosine
cacugcuucugaugaggccguuaggccgaanuggcgcg

SEQ ID NO: 5521 - RNA, 38 nt, Artificial Sequence
  Description of Artificial Sequence:  Enzymatic Nucleic acid
  misc_feature (31)..(31): n stands for inosine
aaauucaccugaugaggccguuaggccgaancuuugug

SEQ ID NO: 5522 - RNA, 38 nt, Artificial Sequence
  Description of Artificial Sequence:  Enzymatic Nucleic acid
  misc_feature (31)..(31): n stands for inosine
cguggucacugaugaggccguuaggccgaancuccaau

SEQ ID NO: 5523 - RNA, 38 nt, Artificial Sequence
  Description of Artificial Sequence:  Enzymatic Nucleic acid
  misc_feature (31)..(31): n stands for inosine
uccuccgucugaugaggccguuaggccgaanucaugcu

SEQ ID NO: 5524 - RNA, 38 nt, Artificial Sequence
  Description of Artificial Sequence:  Enzymatic Nucleic acid
  misc_feature (31)..(31): n stands for inosine
auccuccgcugaugaggccguuaggccgaangucaugc

SEQ ID NO: 5525 - RNA, 38 nt, Artificial Sequence
  Description of Artificial Sequence:  Enzymatic Nucleic acid
  misc_feature (31)..(31): n stands for inosine
auuuuuagcugaugaggccguuaggccgaancucauac

SEQ ID NO: 5526 - RNA, 38 nt, Artificial Sequence
  Description of Artificial Sequence:  Enzymatic Nucleic acid
  misc_feature (31)..(31): n stands for inosine
gauuuuuacugaugaggccguuaggccgaangcucaua

SEQ ID NO: 5527 - RNA, 38 nt, Artificial Sequence
  Description of Artificial Sequence:  Enzymatic Nucleic acid
  misc_feature (31)..(31): n stands for inosine
ggauuuuucugaugaggccguuaggccgaanggcucau

SEQ ID NO: 5528 - RNA, 38 nt, Artificial Sequence
  Description of Artificial Sequence:  Enzymatic Nucleic acid
  misc_feature (31)..(31): n stands for inosine
aagagucucugaugaggccguuaggccgaanauuuuua

SEQ ID NO: 5529 - RNA, 38 nt, Artificial Sequence
  Description of Artificial Sequence:  Enzymatic Nucleic acid
  misc_feature (31)..(31): n stands for inosine
aaagaguccugaugaggccguuaggccgaangauuuuu

SEQ ID NO: 5530 - RNA, 38 nt, Artificial Sequence
  Description of Artificial Sequence:  Enzymatic Nucleic acid
  misc_feature (31)..(31): n stands for inosine
aucgaaagcugaugaggccguuaggccgaanucuggau

SEQ ID NO: 5531 - RNA, 38 nt, Artificial Sequence
  Description of Artificial Sequence:  Enzymatic Nucleic acid
  misc_feature (31)..(31): n stands for inosine
guaucgaacugaugaggccguuaggccgaanagucugg

SEQ ID NO: 5532 - RNA, 38 nt, Artificial Sequence
  Description of Artificial Sequence:  Enzymatic Nucleic acid
  misc_feature (31)..(31): n stands for inosine
ugguccugcugaugaggccguuaggccgaanuaucgaa

SEQ ID NO: 5533 - RNA, 38 nt, Artificial Sequence
  Description of Artificial Sequence:  Enzymatic Nucleic acid
  misc_feature (31)..(31): n stands for inosine
uugguccucugaugaggccguuaggccgaanguaucga

SEQ ID NO: 5534 - RNA, 38 nt, Artificial Sequence
  Description of Artificial Sequence:  Enzymatic Nucleic acid
  misc_feature (31)..(31): n stands for inosine
cuuggucccugaugaggccguuaggccgaangguaucg

SEQ ID NO: 5535 - RNA, 38 nt, Artificial Sequence
  Description of Artificial Sequence:  Enzymatic Nucleic acid
  misc_feature (31)..(31): n stands for inosine
uguggcuucugaugaggccguuaggccgaanuccuggg

SEQ ID NO: 5536 - RNA, 38 nt, Artificial Sequence
  Description of Artificial Sequence:  Enzymatic Nucleic acid
  misc_feature (31)..(31): n stands for inosine
cuguggcucugaugaggccguuaggccgaanguccugg

SEQ ID NO: 5537 - RNA, 38 nt, Artificial Sequence
  Description of Artificial Sequence:  Enzymatic Nucleic acid
  misc_feature (31)..(31): n stands for inosine
ccugcugucugaugaggccguuaggccgaancuugguc

SEQ ID NO: 5538 - RNA, 38 nt, Artificial Sequence
  Description of Artificial Sequence:  Enzymatic Nucleic acid
  misc_feature (31)..(31): n stands for inosine
accugcugcugaugaggccguuaggccgaangcuuggu

SEQ ID NO: 5539 - RNA, 38 nt, Artificial Sequence
  Description of Artificial Sequence:  Enzymatic Nucleic acid
  misc_feature (31)..(31): n stands for inosine
ggaccugccugaugaggccguuaggccgaanuggcuug

SEQ ID NO: 5540 - RNA, 38 nt, Artificial Sequence
  Description of Artificial Sequence:  Enzymatic Nucleic acid
  misc_feature (31)..(31): n stands for inosine
ggaggacccugaugaggccguuaggccgaancuguggc

SEQ ID NO: 5541 - RNA, 38 nt, Artificial Sequence
  Description of Artificial Sequence:  Enzymatic Nucleic acid
  misc_feature (31)..(31): n stands for inosine
gggauggacugaugaggccguuaggccgaanaccugcu

SEQ ID NO: 5542 - RNA, 38 nt, Artificial Sequence
  Description of Artificial Sequence:  Enzymatic Nucleic acid
  misc_feature (31)..(31): n stands for inosine
ugggauggcugaugaggccguuaggccgaangaccugc

SEQ ID NO: 5543 - RNA, 38 nt, Artificial Sequence
  Description of Artificial Sequence:  Enzymatic Nucleic acid
  misc_feature (31)..(31): n stands for inosine
guugggaucugaugaggccguuaggccgaanaggaccu

SEQ ID NO: 5544 - RNA, 38 nt, Artificial Sequence
  Description of Artificial Sequence:  Enzymatic Nucleic acid
  misc_feature (31)..(31): n stands for inosine
uguugggacugaugaggccguuaggccgaangaggacc

SEQ ID NO: 5545 - RNA, 38 nt, Artificial Sequence
  Description of Artificial Sequence:  Enzymatic Nucleic acid
  misc_feature (31)..(31): n stands for inosine
ggcuguugcugaugaggccguuaggccgaanauggagg

SEQ ID NO: 5546 - RNA, 38 nt, Artificial Sequence
  Description of Artificial Sequence:  Enzymatic Nucleic acid
  misc_feature (31)..(31): n stands for inosine
uggcuguucugaugaggccguuaggccgaangauggag

SEQ ID NO: 5547 - RNA, 38 nt, Artificial Sequence
  Description of Artificial Sequence:  Enzymatic Nucleic acid
  misc_feature (31)..(31): n stands for inosine
auggcugucugaugaggccguuaggccgaanggaugga

SEQ ID NO: 5548 - RNA, 38 nt, Artificial Sequence
  Description of Artificial Sequence:  Enzymatic Nucleic acid
  misc_feature (31)..(31): n stands for inosine
ggcauggccugaugaggccguuaggccgaanuugggau

SEQ ID NO: 5549 - RNA, 38 nt, Artificial Sequence
  Description of Artificial Sequence:  Enzymatic Nucleic acid
  misc_feature (31)..(31): n stands for inosine
gcgggcaucugaugaggccguuaggccgaancuguugg

SEQ ID NO: 5550 - RNA, 38 nt, Artificial Sequence
  Description of Artificial Sequence:  Enzymatic Nucleic acid
  misc_feature (31)..(31): n stands for inosine
ugcgggcacugaugaggccguuaggccgaangcuguug

SEQ ID NO: 5551 - RNA, 38 nt, Artificial Sequence
  Description of Artificial Sequence:  Enzymatic Nucleic acid
  misc_feature (31)..(31): n stands for inosine
cuaaugcgcugaugaggccguuaggccgaancauggcu

SEQ ID NO: 5552 - RNA, 38 nt, Artificial Sequence
  Description of Artificial Sequence:  Enzymatic Nucleic acid
  misc_feature (31)..(31): n stands for inosine
gcuaaugccugaugaggccguuaggccgaangcauggc

SEQ ID NO: 5553 - RNA, 38 nt, Artificial Sequence
  Description of Artificial Sequence:  Enzymatic Nucleic acid
  misc_feature (31)..(31): n stands for inosine
agagcuaacugaugaggccguuaggccgaancgggcau

SEQ ID NO: 5554 - RNA, 38 nt, Artificial Sequence
  Description of Artificial Sequence:  Enzymatic Nucleic acid
  misc_feature (31)..(31): n stands for inosine
ggucuaagcugaugaggccguuaggccgaancuaaugc

SEQ ID NO: 5555 - RNA, 38 nt, Artificial Sequence
  Description of Artificial Sequence:  Enzymatic Nucleic acid
  misc_feature (31)..(31): n stands for inosine
ugggucuacugaugaggccguuaggccgaanagcuaau

SEQ ID NO: 5556 - RNA, 38 nt, Artificial Sequence
  Description of Artificial Sequence:  Enzymatic Nucleic acid
  misc_feature (31)..(31): n stands for inosine
agucugugcugaugaggccguuaggccgaanucuaaga

SEQ ID NO: 5557 - RNA, 38 nt, Artificial Sequence
  Description of Artificial Sequence:  Enzymatic Nucleic acid
  misc_feature (31)..(31): n stands for inosine
cagucugucugaugaggccguuaggccgaangucuaag

SEQ ID NO: 5558 - RNA, 38 nt, Artificial Sequence
  Description of Artificial Sequence:  Enzymatic Nucleic acid
  misc_feature (31)..(31): n stands for inosine
ccagucugcugaugaggccguuaggccgaanggucuaa

SEQ ID NO: 5559 - RNA, 38 nt, Artificial Sequence
  Description of Artificial Sequence:  Enzymatic Nucleic acid
  misc_feature (31)..(31): n stands for inosine
aaccaguccugaugaggccguuaggccgaanugggucu

SEQ ID NO: 5560 - RNA, 38 nt, Artificial Sequence
  Description of Artificial Sequence:  Enzymatic Nucleic acid
  misc_feature (31)..(31): n stands for inosine
gcaaaacccugaugaggccguuaggccgaanucugugg

SEQ ID NO: 5561 - RNA, 38 nt, Artificial Sequence
  Description of Artificial Sequence:  Enzymatic Nucleic acid
  misc_feature (31)..(31): n stands for inosine
guaaacgucugaugaggccguuaggccgaancaaaacc

SEQ ID NO: 5562 - RNA, 38 nt, Artificial Sequence
  Description of Artificial Sequence:  Enzymatic Nucleic acid
  misc_feature (31)..(31): n stands for inosine
cuagucggcugaugaggccguuaggccgaanuaaacgu

SEQ ID NO: 5563 - RNA, 38 nt, Artificial Sequence
  Description of Artificial Sequence:  Enzymatic Nucleic acid
  misc_feature (31)..(31): n stands for inosine
ggcuaguccugaugaggccguuaggccgaanuguaaac

SEQ ID NO: 5564 - RNA, 38 nt, Artificial Sequence
  Description of Artificial Sequence:  Enzymatic Nucleic acid
  misc_feature (31)..(31): n stands for inosine
uccuggcucugaugaggccguuaggccgaanucggugu

SEQ ID NO: 5565 - RNA, 38 nt, Artificial Sequence
  Description of Artificial Sequence:  Enzymatic Nucleic acid
  misc_feature (31)..(31): n stands for inosine
uacuuccucugaugaggccguuaggccgaancuagucg

SEQ ID NO: 5566 - RNA, 38 nt, Artificial Sequence
  Description of Artificial Sequence:  Enzymatic Nucleic acid
  misc_feature (31)..(31): n stands for inosine
guacuucccugaugaggccguuaggccgaangcuaguc

SEQ ID NO: 5567 - RNA, 38 nt, Artificial Sequence
  Description of Artificial Sequence:  Enzymatic Nucleic acid
  misc_feature (31)..(31): n stands for inosine
gagguggacugaugaggccguuaggccgaanuacuucc

SEQ ID NO: 5568 - RNA, 38 nt, Artificial Sequence
  Description of Artificial Sequence:  Enzymatic Nucleic acid
  misc_feature (31)..(31): n stands for inosine
cccgaggucugaugaggccguuaggccgaanaaguacu

SEQ ID NO: 5569 - RNA, 38 nt, Artificial Sequence
  Description of Artificial Sequence:  Enzymatic Nucleic acid
  misc_feature (31)..(31): n stands for inosine
gcccgaggcugaugaggccguuaggccgaangaaguac

SEQ ID NO: 5570 - RNA, 38 nt, Artificial Sequence
  Description of Artificial Sequence:  Enzymatic Nucleic acid
  misc_feature (31)..(31): n stands for inosine
gugcccgacugaugaggccguuaggccgaanuggaagu

SEQ ID NO: 5571 - RNA, 38 nt, Artificial Sequence
  Description of Artificial Sequence:  Enzymatic Nucleic acid
  misc_feature (31)..(31): n stands for inosine
ugugcccgcugaugaggccguuaggccgaanguggaag

SEQ ID NO: 5572 - RNA, 38 nt, Artificial Sequence
  Description of Artificial Sequence:  Enzymatic Nucleic acid
  misc_feature (31)..(31): n stands for inosine
ccaaaaugcugaugaggccguuaggccgaancccgagg

SEQ ID NO: 5573 - RNA, 38 nt, Artificial Sequence
  Description of Artificial Sequence:  Enzymatic Nucleic acid
  misc_feature (31)..(31): n stands for inosine
ucccaaaacugaugaggccguuaggccgaanugcccga

SEQ ID NO: 5574 - RNA, 38 nt, Artificial Sequence
  Description of Artificial Sequence:  Enzymatic Nucleic acid
  misc_feature (31)..(31): n stands for inosine
caaaggaacugaugaggccguuaggccgaancaacuuc

SEQ ID NO: 5575 - RNA, 38 nt, Artificial Sequence
  Description of Artificial Sequence:  Enzymatic Nucleic acid
  misc_feature (31)..(31): n stands for inosine
aagacaaacugaugaggccguuaggccgaanaaugcaa

SEQ ID NO: 5576 - RNA, 38 nt, Artificial Sequence
  Description of Artificial Sequence:  Enzymatic Nucleic acid
  misc_feature (31)..(31): n stands for inosine
gaagacaacugaugaggccguuaggccgaangaaugca

SEQ ID NO: 5577 - RNA, 38 nt, Artificial Sequence
  Description of Artificial Sequence:  Enzymatic Nucleic acid
  misc_feature (31)..(31): n stands for inosine
caguuugacugaugaggccguuaggccgaanacaaagg

SEQ ID NO: 5578 - RNA, 38 nt, Artificial Sequence
  Description of Artificial Sequence:  Enzymatic Nucleic acid
  misc_feature (31)..(31): n stands for inosine
ucacaguucugaugaggccguuaggccgaanaagacaa

SEQ ID NO: 5579 - RNA, 38 nt, Artificial Sequence
  Description of Artificial Sequence:  Enzymatic Nucleic acid
  misc_feature (31)..(31): n stands for inosine
ugcuucaccugaugaggccguuaggccgaanuuugaag

SEQ ID NO: 5580 - RNA, 38 nt, Artificial Sequence
  Description of Artificial Sequence:  Enzymatic Nucleic acid
  misc_feature (31)..(31): n stands for inosine
ucuguaaacugaugaggccguuaggccgaancuucaca

SEQ ID NO: 5581 - RNA, 38 nt, Artificial Sequence
  Description of Artificial Sequence:  Enzymatic Nucleic acid
  misc_feature (31)..(31): n stands for inosine
ugcguuuccugaugaggccguuaggccgaanuaaaugc

SEQ ID NO: 5582 - RNA, 38 nt, Artificial Sequence
  Description of Artificial Sequence:  Enzymatic Nucleic acid
  misc_feature (31)..(31): n stands for inosine
uugcuggacugaugaggccguuaggccgaancguuucu

SEQ ID NO: 5583 - RNA, 38 nt, Artificial Sequence
  Description of Artificial Sequence:  Enzymatic Nucleic acid
  misc_feature (31)..(31): n stands for inosine
uucuugcucugaugaggccguuaggccgaanaugcguu

SEQ ID NO: 5584 - RNA, 38 nt, Artificial Sequence
  Description of Artificial Sequence:  Enzymatic Nucleic acid
  misc_feature (31)..(31): n stands for inosine
auucuugccugaugaggccguuaggccgaangaugcgu

SEQ ID NO: 5585 - RNA, 38 nt, Artificial Sequence
  Description of Artificial Sequence:  Enzymatic Nucleic acid
  misc_feature (31)..(31): n stands for inosine
aauauucucugaugaggccguuaggccgaancuggaug

SEQ ID NO: 5586 - RNA, 38 nt, Artificial Sequence
  Description of Artificial Sequence:  Enzymatic Nucleic acid
  misc_feature (31)..(31): n stands for inosine
gcucaaagcugaugaggccguuaggccgaanacaauau

SEQ ID NO: 5587 - RNA, 38 nt, Artificial Sequence
  Description of Artificial Sequence:  Enzymatic Nucleic acid
  misc_feature (31)..(31): n stands for inosine
ugcucaaacugaugaggccguuaggccgaangacaaua

SEQ ID NO: 5588 - RNA, 38 nt, Artificial Sequence
  Description of Artificial Sequence:  Enzymatic Nucleic acid
  misc_feature (31)..(31): n stands for inosine
cugcucaacugaugaggccguuaggccgaanggacaau

SEQ ID NO: 5589 - RNA, 38 nt, Artificial Sequence
  Description of Artificial Sequence:  Enzymatic Nucleic acid
  misc_feature (31)..(31): n stands for inosine
uaaauuuccugaugaggccguuaggccgaancucaaag

SEQ ID NO: 5590 - RNA, 38 nt, Artificial Sequence
  Description of Artificial Sequence:  Enzymatic Nucleic acid
  misc_feature (31)..(31): n stands for inosine
ucuuugaacugaugaggccguuaggccgaanauaaauu

SEQ ID NO: 5591 - RNA, 38 nt, Artificial Sequence
  Description of Artificial Sequence:  Enzymatic Nucleic acid
  misc_feature (31)..(31): n stands for inosine
uaccucuucugaugaggccguuaggccgaanaaagaua

SEQ ID NO: 5592 - RNA, 38 nt, Artificial Sequence
  Description of Artificial Sequence:  Enzymatic Nucleic acid
  misc_feature (31)..(31): n stands for inosine
aaacuccacugaugaggccguuaggccgaanaucccca

SEQ ID NO: 5593 - RNA, 38 nt, Artificial Sequence
  Description of Artificial Sequence:  Enzymatic Nucleic acid
  misc_feature (31)..(31): n stands for inosine
agcgacaacugaugaggccguuaggccgaanaaaaacu

SEQ ID NO: 5594 - RNA, 38 nt, Artificial Sequence
  Description of Artificial Sequence:  Enzymatic Nucleic acid
  misc_feature (31)..(31): n stands for inosine
aaaucaaucugaugaggccguuaggccgaancgacaau

SEQ ID NO: 5595 - RNA, 38 nt, Artificial Sequence
  Description of Artificial Sequence:  Enzymatic Nucleic acid
  misc_feature (31)..(31): n stands for inosine
cccauugacugaugaggccguuaggccgaanuaaaaau

SEQ ID NO: 5596 - RNA, 38 nt, Artificial Sequence
  Description of Artificial Sequence:  Enzymatic Nucleic acid
  misc_feature (31)..(31): n stands for inosine
gagcccaucugaugaggccguuaggccgaanaaguaaa

SEQ ID NO: 5597 - RNA, 38 nt, Artificial Sequence
  Description of Artificial Sequence:  Enzymatic Nucleic acid
  misc_feature (31)..(31): n stands for inosine
guuggaagcugaugaggccguuaggccgaancccauug

SEQ ID NO: 5598 - RNA, 38 nt, Artificial Sequence
  Description of Artificial Sequence:  Enzymatic Nucleic acid
  misc_feature (31)..(31): n stands for inosine
uuguuggacugaugaggccguuaggccgaanagcccau

SEQ ID NO: 5599 - RNA, 38 nt, Artificial Sequence
  Description of Artificial Sequence:  Enzymatic Nucleic acid
  misc_feature (31)..(31): n stands for inosine
uccuuguucugaugaggccguuaggccgaanaagagcc

SEQ ID NO: 5600 - RNA, 38 nt, Artificial Sequence
  Description of Artificial Sequence:  Enzymatic Nucleic acid
  misc_feature (31)..(31): n stands for inosine
uuccuugucugaugaggccguuaggccgaangaagagc

SEQ ID NO: 5601 - RNA, 38 nt, Artificial Sequence
  Description of Artificial Sequence:  Enzymatic Nucleic acid
  misc_feature (31)..(31): n stands for inosine
uucuuccucugaugaggccguuaggccgaanuuggaag

SEQ ID NO: 5602 - RNA, 38 nt, Artificial Sequence
  Description of Artificial Sequence:  Enzymatic Nucleic acid
  misc_feature (31)..(31): n stands for inosine
uaccagcacugaugaggccguuaggccgaancuucuuc

SEQ ID NO: 5603 - RNA, 38 nt, Artificial Sequence
  Description of Artificial Sequence:  Enzymatic Nucleic acid
  misc_feature (31)..(31): n stands for inosine
gugcuacccugaugaggccguuaggccgaancaagcuu

SEQ ID NO: 5604 - RNA, 38 nt, Artificial Sequence
  Description of Artificial Sequence:  Enzymatic Nucleic acid
  misc_feature (31)..(31): n stands for inosine
guagcaagcugaugaggccguuaggccgaancuaccag

SEQ ID NO: 5605 - RNA, 38 nt, Artificial Sequence
  Description of Artificial Sequence:  Enzymatic Nucleic acid
  misc_feature (31)..(31): n stands for inosine
ggguagcacugaugaggccguuaggccgaanugcuacc

SEQ ID NO: 5606 - RNA, 38 nt, Artificial Sequence
  Description of Artificial Sequence:  Enzymatic Nucleic acid
  misc_feature (31)..(31): n stands for inosine
cucagggucugaugaggccguuaggccgaancaagugc

SEQ ID NO: 5607 - RNA, 38 nt, Artificial Sequence
  Description of Artificial Sequence:  Enzymatic Nucleic acid
  misc_feature (31)..(31): n stands for inosine
gaacucagcugaugaggccguuaggccgaanuagcaag

SEQ ID NO: 5608 - RNA, 38 nt, Artificial Sequence
  Description of Artificial Sequence:  Enzymatic Nucleic acid
  misc_feature (31)..(31): n stands for inosine
ugaacucacugaugaggccguuaggccgaanguagcaa

SEQ ID NO: 5609 - RNA, 38 nt, Artificial Sequence
  Description of Artificial Sequence:  Enzymatic Nucleic acid
  misc_feature (31)..(31): n stands for inosine
augaacuccugaugaggccguuaggccgaangguagca

SEQ ID NO: 5610 - RNA, 38 nt, Artificial Sequence
  Description of Artificial Sequence:  Enzymatic Nucleic acid
  misc_feature (31)..(31): n stands for inosine
ggccuggacugaugaggccguuaggccgaanaacucag

SEQ ID NO: 5611 - RNA, 38 nt, Artificial Sequence
  Description of Artificial Sequence:  Enzymatic Nucleic acid
  misc_feature (31)..(31): n stands for inosine
uugggccucugaugaggccguuaggccgaanaugaacu

SEQ ID NO: 5612 - RNA, 38 nt, Artificial Sequence
  Description of Artificial Sequence:  Enzymatic Nucleic acid
  misc_feature (31)..(31): n stands for inosine
guugggcccugaugaggccguuaggccgaangaugaac

SEQ ID NO: 5613 - RNA, 38 nt, Artificial Sequence
  Description of Artificial Sequence:  Enzymatic Nucleic acid
  misc_feature (31)..(31): n stands for inosine
cacaguugcugaugaggccguuaggccgaanccuggau

SEQ ID NO: 5614 - RNA, 38 nt, Artificial Sequence
  Description of Artificial Sequence:  Enzymatic Nucleic acid
  misc_feature (31)..(31): n stands for inosine
ucacaguucugaugaggccguuaggccgaangccugga

SEQ ID NO: 5615 - RNA, 38 nt, Artificial Sequence
  Description of Artificial Sequence:  Enzymatic Nucleic acid
  misc_feature (31)..(31): n stands for inosine
cucacagucugaugaggccguuaggccgaanggccugg

SEQ ID NO: 5616 - RNA, 38 nt, Artificial Sequence
  Description of Artificial Sequence:  Enzymatic Nucleic acid
  misc_feature (31)..(31): n stands for inosine
uugcucaccugaugaggccguuaggccgaanuugggcc

SEQ ID NO: 5617 - RNA, 38 nt, Artificial Sequence
  Description of Artificial Sequence:  Enzymatic Nucleic acid
  misc_feature (31)..(31): n stands for inosine
gugcuccucugaugaggccguuaggccgaancucacag

SEQ ID NO: 5618 - RNA, 38 nt, Artificial Sequence
  Description of Artificial Sequence:  Enzymatic Nucleic acid
  misc_feature (31)..(31): n stands for inosine
guggcuugcugaugaggccguuaggccgaancuccuug

SEQ ID NO: 5619 - RNA, 38 nt, Artificial Sequence
  Description of Artificial Sequence:  Enzymatic Nucleic acid
  misc_feature (31)..(31): n stands for inosine
uuguggcucugaugaggccguuaggccgaanugcuccu

SEQ ID NO: 5620 - RNA, 38 nt, Artificial Sequence
  Description of Artificial Sequence:  Enzymatic Nucleic acid
  misc_feature (31)..(31): n stands for inosine
agacuugucugaugaggccguuaggccgaancuugugc

SEQ ID NO: 5621 - RNA, 38 nt, Artificial Sequence
  Description of Artificial Sequence:  Enzymatic Nucleic acid
  misc_feature (31)..(31): n stands for inosine
aagacuugcugaugaggccguuaggccgaangcuugug

SEQ ID NO: 5622 - RNA, 38 nt, Artificial Sequence
  Description of Artificial Sequence:  Enzymatic Nucleic acid
  misc_feature (31)..(31): n stands for inosine
ggaagacucugaugaggccguuaggccgaanuggcuug

SEQ ID NO: 5623 - RNA, 38 nt, Artificial Sequence
  Description of Artificial Sequence:  Enzymatic Nucleic acid
  misc_feature (31)..(31): n stands for inosine
ccucuggacugaugaggccguuaggccgaanacuugug

SEQ ID NO: 5624 - RNA, 38 nt, Artificial Sequence
  Description of Artificial Sequence:  Enzymatic Nucleic acid
  misc_feature (31)..(31): n stands for inosine
cauccucucugaugaggccguuaggccgaanaagacuu

SEQ ID NO: 5625 - RNA, 38 nt, Artificial Sequence
  Description of Artificial Sequence:  Enzymatic Nucleic acid
  misc_feature (31)..(31): n stands for inosine
gcauccuccugaugaggccguuaggccgaangaagacu

SEQ ID NO: 5626 - RNA, 38 nt, Artificial Sequence
  Description of Artificial Sequence:  Enzymatic Nucleic acid
  misc_feature (31)..(31): n stands for inosine
uggaaucacugaugaggccguuaggccgaancauccuc

SEQ ID NO: 5627 - RNA, 38 nt, Artificial Sequence
  Description of Artificial Sequence:  Enzymatic Nucleic acid
  misc_feature (31)..(31): n stands for inosine
gaaccacucugaugaggccguuaggccgaanaaucaag

SEQ ID NO: 5628 - RNA, 38 nt, Artificial Sequence
  Description of Artificial Sequence:  Enzymatic Nucleic acid
  misc_feature (31)..(31): n stands for inosine
agaaccaccugaugaggccguuaggccgaangaaucaa

SEQ ID NO: 5629 - RNA, 38 nt, Artificial Sequence
  Description of Artificial Sequence:  Enzymatic Nucleic acid
  misc_feature (31)..(31): n stands for inosine
cuugaagccugaugaggccguuaggccgaanaaccacu

SEQ ID NO: 5630 - RNA, 38 nt, Artificial Sequence
  Description of Artificial Sequence:  Enzymatic Nucleic acid
  misc_feature (31)..(31): n stands for inosine
agccuugacugaugaggccguuaggccgaancagaacc

SEQ ID NO: 5631 - RNA, 38 nt, Artificial Sequence
  Description of Artificial Sequence:  Enzymatic Nucleic acid
  misc_feature (31)..(31): n stands for inosine
ggaagccucugaugaggccguuaggccgaanaagcaga

SEQ ID NO: 5632 - RNA, 38 nt, Artificial Sequence
  Description of Artificial Sequence:  Enzymatic Nucleic acid
  misc_feature (31)..(31): n stands for inosine
gcaguggacugaugaggccguuaggccgaanccuugaa

SEQ ID NO: 5633 - RNA, 38 nt, Artificial Sequence
  Description of Artificial Sequence:  Enzymatic Nucleic acid
  misc_feature (31)..(31): n stands for inosine
uuugcagucugaugaggccguuaggccgaanaagccuu

SEQ ID NO: 5634 - RNA, 38 nt, Artificial Sequence
  Description of Artificial Sequence:  Enzymatic Nucleic acid
  misc_feature (31)..(31): n stands for inosine
uuuugcagcugaugaggccguuaggccgaangaagccu

SEQ ID NO: 5635 - RNA, 38 nt, Artificial Sequence
  Description of Artificial Sequence:  Enzymatic Nucleic acid
  misc_feature (31)..(31): n stands for inosine
uguuuugccugaugaggccguuaggccgaanuggaagc

SEQ ID NO: 5636 - RNA, 38 nt, Artificial Sequence
  Description of Artificial Sequence:  Enzymatic Nucleic acid
  misc_feature (31)..(31): n stands for inosine
uaguguuucugaugaggccguuaggccgaancagugga

SEQ ID NO: 5637 - RNA, 38 nt, Artificial Sequence
  Description of Artificial Sequence:  Enzymatic Nucleic acid
  misc_feature (31)..(31): n stands for inosine
aucuuuagcugaugaggccguuaggccgaanuuuugca

SEQ ID NO: 5638 - RNA, 38 nt, Artificial Sequence
  Description of Artificial Sequence:  Enzymatic Nucleic acid
  misc_feature (31)..(31): n stands for inosine
ggaucuuucugaugaggccguuaggccgaanuguuuug

SEQ ID NO: 5639 - RNA, 38 nt, Artificial Sequence
  Description of Artificial Sequence:  Enzymatic Nucleic acid
  misc_feature (31)..(31): n stands for inosine
gccuucuucugaugaggccguuaggccgaanaucuuua

SEQ ID NO: 5640 - RNA, 38 nt, Artificial Sequence
  Description of Artificial Sequence:  Enzymatic Nucleic acid
  misc_feature (31)..(31): n stands for inosine
ggccuucucugaugaggccguuaggccgaangaucuuu

SEQ ID NO: 5641 - RNA, 38 nt, Artificial Sequence
  Description of Artificial Sequence:  Enzymatic Nucleic acid
  misc_feature (31)..(31): n stands for inosine
gccaugaacugaugaggccguuaggccgaanccuucuu

SEQ ID NO: 5642 - RNA, 38 nt, Artificial Sequence
  Description of Artificial Sequence:  Enzymatic Nucleic acid
  misc_feature (31)..(31): n stands for inosine
ggccaugacugaugaggccguuaggccgaangccuucu

SEQ ID NO: 5643 - RNA, 38 nt, Artificial Sequence
  Description of Artificial Sequence:  Enzymatic Nucleic acid
  misc_feature (31)..(31): n stands for inosine
uggggccacugaugaggccguuaggccgaanaaggccu

SEQ ID NO: 5644 - RNA, 38 nt, Artificial Sequence
  Description of Artificial Sequence:  Enzymatic Nucleic acid
  misc_feature (31)..(31): n stands for inosine
ccugcuggcugaugaggccguuaggccgaanccaugaa

SEQ ID NO: 5645 - RNA, 38 nt, Artificial Sequence
  Description of Artificial Sequence:  Enzymatic Nucleic acid
  misc_feature (31)..(31): n stands for inosine
gccugcugcugaugaggccguuaggccgaangccauga

SEQ ID NO: 5646 - RNA, 38 nt, Artificial Sequence
  Description of Artificial Sequence:  Enzymatic Nucleic acid
  misc_feature (31)..(31): n stands for inosine
ggccugcucugaugaggccguuaggccgaanggccaug

SEQ ID NO: 5647 - RNA, 38 nt, Artificial Sequence
  Description of Artificial Sequence:  Enzymatic Nucleic acid
  misc_feature (31)..(31): n stands for inosine
cggccugccugaugaggccguuaggccgaangggccau

SEQ ID NO: 5648 - RNA, 38 nt, Artificial Sequence
  Description of Artificial Sequence:  Enzymatic Nucleic acid
  misc_feature (31)..(31): n stands for inosine
auccggcccugaugaggccguuaggccgaancuggggc

SEQ ID NO: 5649 - RNA, 38 nt, Artificial Sequence
  Description of Artificial Sequence:  Enzymatic Nucleic acid
  misc_feature (31)..(31): n stands for inosine
accgaucccugaugaggccguuaggccgaanccugcug

SEQ ID NO: 5650 - RNA, 38 nt, Artificial Sequence
  Description of Artificial Sequence:  Enzymatic Nucleic acid
  misc_feature (31)..(31): n stands for inosine
cuugauaccugaugaggccguuaggccgaanuaccgau

SEQ ID NO: 5651 - RNA, 38 nt, Artificial Sequence
  Description of Artificial Sequence:  Enzymatic Nucleic acid
  misc_feature (31)..(31): n stands for inosine
ccaugacucugaugaggccguuaggccgaanauacagu

SEQ ID NO: 5652 - RNA, 38 nt, Artificial Sequence
  Description of Artificial Sequence:  Enzymatic Nucleic acid
  misc_feature (31)..(31): n stands for inosine
accugccacugaugaggccguuaggccgaanacuugau

SEQ ID NO: 5653 - RNA, 38 nt, Artificial Sequence
  Description of Artificial Sequence:  Enzymatic Nucleic acid
  misc_feature (31)..(31): n stands for inosine
acuguacccugaugaggccguuaggccgaanccaugac

SEQ ID NO: 5654 - RNA, 38 nt, Artificial Sequence
  Description of Artificial Sequence:  Enzymatic Nucleic acid
  misc_feature (31)..(31): n stands for inosine
uauccuaccugaugaggccguuaggccgaanuaccugc

SEQ ID NO: 5655 - RNA, 38 nt, Artificial Sequence
  Description of Artificial Sequence:  Enzymatic Nucleic acid
  misc_feature (31)..(31): n stands for inosine
gacagagucugaugaggccguuaggccgaancuuaucc

SEQ ID NO: 5656 - RNA, 38 nt, Artificial Sequence
  Description of Artificial Sequence:  Enzymatic Nucleic acid
  misc_feature (31)..(31): n stands for inosine
ggacagagcugaugaggccguuaggccgaangcuuauc

SEQ ID NO: 5657 - RNA, 38 nt, Artificial Sequence
  Description of Artificial Sequence:  Enzymatic Nucleic acid
  misc_feature (31)..(31): n stands for inosine
agggacagcugaugaggccguuaggccgaanuggcuua

SEQ ID NO: 5658 - RNA, 38 nt, Artificial Sequence
  Description of Artificial Sequence:  Enzymatic Nucleic acid
  misc_feature (31)..(31): n stands for inosine
gaagggaccugaugaggccguuaggccgaanaguggcu

SEQ ID NO: 5659 - RNA, 38 nt, Artificial Sequence
  Description of Artificial Sequence:  Enzymatic Nucleic acid
  misc_feature (31)..(31): n stands for inosine
ccaggaagcugaugaggccguuaggccgaanacagagu

SEQ ID NO: 5660 - RNA, 38 nt, Artificial Sequence
  Description of Artificial Sequence:  Enzymatic Nucleic acid
  misc_feature (31)..(31): n stands for inosine
cccaggaacugaugaggccguuaggccgaangacagag

SEQ ID NO: 5661 - RNA, 38 nt, Artificial Sequence
  Description of Artificial Sequence:  Enzymatic Nucleic acid
  misc_feature (31)..(31): n stands for inosine
gcccaggacugaugaggccguuaggccgaanggacaga

SEQ ID NO: 5662 - RNA, 38 nt, Artificial Sequence
  Description of Artificial Sequence:  Enzymatic Nucleic acid
  misc_feature (31)..(31): n stands for inosine
uuugcccacugaugaggccguuaggccgaanaagggac

SEQ ID NO: 5663 - RNA, 38 nt, Artificial Sequence
  Description of Artificial Sequence:  Enzymatic Nucleic acid
  misc_feature (31)..(31): n stands for inosine
cuuugccccugaugaggccguuaggccgaangaaggga

SEQ ID NO: 5664 - RNA, 38 nt, Artificial Sequence
  Description of Artificial Sequence:  Enzymatic Nucleic acid
  misc_feature (31)..(31): n stands for inosine
uucuucuucugaugaggccguuaggccgaancccagga

SEQ ID NO: 5665 - RNA, 38 nt, Artificial Sequence
  Description of Artificial Sequence:  Enzymatic Nucleic acid
  misc_feature (31)..(31): n stands for inosine
ucuaaggacugaugaggccguuaggccgaanaauucau

SEQ ID NO: 5666 - RNA, 38 nt, Artificial Sequence
  Description of Artificial Sequence:  Enzymatic Nucleic acid
  misc_feature (31)..(31): n stands for inosine
aagucuaacugaugaggccguuaggccgaanaagaauu

SEQ ID NO: 5667 - RNA, 38 nt, Artificial Sequence
  Description of Artificial Sequence:  Enzymatic Nucleic acid
  misc_feature (31)..(31): n stands for inosine
uaagucuacugaugaggccguuaggccgaangaagaau

SEQ ID NO: 5668 - RNA, 38 nt, Artificial Sequence
  Description of Artificial Sequence:  Enzymatic Nucleic acid
  misc_feature (31)..(31): n stands for inosine
caaaaguacugaugaggccguuaggccgaanucuaagg

SEQ ID NO: 5669 - RNA, 38 nt, Artificial Sequence
  Description of Artificial Sequence:  Enzymatic Nucleic acid
  misc_feature (31)..(31): n stands for inosine
uuuacaaacugaugaggccguuaggccgaanuaagucu

SEQ ID NO: 5670 - RNA, 38 nt, Artificial Sequence
  Description of Artificial Sequence:  Enzymatic Nucleic acid
  misc_feature (31)..(31): n stands for inosine
uaccguggcugaugaggccguuaggccgaanacauuuu

SEQ ID NO: 5671 - RNA, 38 nt, Artificial Sequence
  Description of Artificial Sequence:  Enzymatic Nucleic acid
  misc_feature (31)..(31): n stands for inosine
guaccgugcugaugaggccguuaggccgaangacauuu

SEQ ID NO: 5672 - RNA, 38 nt, Artificial Sequence
  Description of Artificial Sequence:  Enzymatic Nucleic acid
  misc_feature (31)..(31): n stands for inosine
aguaccgucugaugaggccguuaggccgaanggacauu

SEQ ID NO: 5673 - RNA, 38 nt, Artificial Sequence
  Description of Artificial Sequence:  Enzymatic Nucleic acid
  misc_feature (31)..(31): n stands for inosine
aaguaccgcugaugaggccguuaggccgaangggacau

SEQ ID NO: 5674 - RNA, 38 nt, Artificial Sequence
  Description of Artificial Sequence:  Enzymatic Nucleic acid
  misc_feature (31)..(31): n stands for inosine
ggggaguacugaugaggccguuaggccgaanuaccgug

SEQ ID NO: 5675 - RNA, 38 nt, Artificial Sequence
  Description of Artificial Sequence:  Enzymatic Nucleic acid
  misc_feature (31)..(31): n stands for inosine
caguggggcugaugaggccguuaggccgaanuaaguac

SEQ ID NO: 5676 - RNA, 38 nt, Artificial Sequence
  Description of Artificial Sequence:  Enzymatic Nucleic acid
  misc_feature (31)..(31): n stands for inosine
aucaguggcugaugaggccguuaggccgaanaguaagu

SEQ ID NO: 5677 - RNA, 38 nt, Artificial Sequence
  Description of Artificial Sequence:  Enzymatic Nucleic acid
  misc_feature (31)..(31): n stands for inosine
caucagugcugaugaggccguuaggccgaangaguaag

SEQ ID NO: 5678 - RNA, 38 nt, Artificial Sequence
  Description of Artificial Sequence:  Enzymatic Nucleic acid
  misc_feature (31)..(31): n stands for inosine
ccaucagucugaugaggccguuaggccgaanggaguaa

SEQ ID NO: 5679 - RNA, 38 nt, Artificial Sequence
  Description of Artificial Sequence:  Enzymatic Nucleic acid
  misc_feature (31)..(31): n stands for inosine
uccaucagcugaugaggccguuaggccgaangggagua

SEQ ID NO: 5680 - RNA, 38 nt, Artificial Sequence
  Description of Artificial Sequence:  Enzymatic Nucleic acid
  misc_feature (31)..(31): n stands for inosine
gguccauccugaugaggccguuaggccgaanuggggag

SEQ ID NO: 5681 - RNA, 38 nt, Artificial Sequence
  Description of Artificial Sequence:  Enzymatic Nucleic acid
  misc_feature (31)..(31): n stands for inosine
aaaccacucugaugaggccguuaggccgaanuccauca

SEQ ID NO: 5682 - RNA, 38 nt, Artificial Sequence
  Description of Artificial Sequence:  Enzymatic Nucleic acid
  misc_feature (31)..(31): n stands for inosine
gaaaccaccugaugaggccguuaggccgaanguccauc

SEQ ID NO: 5683 - RNA, 38 nt, Artificial Sequence
  Description of Artificial Sequence:  Enzymatic Nucleic acid
  misc_feature (31)..(31): n stands for inosine
ucaugacucugaugaggccguuaggccgaanaaaccac

SEQ ID NO: 5684 - RNA, 38 nt, Artificial Sequence
  Description of Artificial Sequence:  Enzymatic Nucleic acid
  misc_feature (31)..(31): n stands for inosine
cucaugaccugaugaggccguuaggccgaangaaacca

SEQ ID NO: 5685 - RNA, 38 nt, Artificial Sequence
  Description of Artificial Sequence:  Enzymatic Nucleic acid
  misc_feature (31)..(31): n stands for inosine
aacgcucacugaugaggccguuaggccgaanacuggaa

SEQ ID NO: 5686 - RNA, 38 nt, Artificial Sequence
  Description of Artificial Sequence:  Enzymatic Nucleic acid
  misc_feature (31)..(31): n stands for inosine
aacaaguccugaugaggccguuaggccgaanucuaacg

SEQ ID NO: 5687 - RNA, 38 nt, Artificial Sequence
  Description of Artificial Sequence:  Enzymatic Nucleic acid
  misc_feature (31)..(31): n stands for inosine
gacaaacacugaugaggccguuaggccgaanucagucu

SEQ ID NO: 5688 - RNA, 38 nt, Artificial Sequence
  Description of Artificial Sequence:  Enzymatic Nucleic acid
  misc_feature (31)..(31): n stands for inosine
ggaauggacugaugaggccguuaggccgaanacaaaca

SEQ ID NO: 5689 - RNA, 38 nt, Artificial Sequence
  Description of Artificial Sequence:  Enzymatic Nucleic acid
  misc_feature (31)..(31): n stands for inosine
aauggaaucugaugaggccguuaggccgaanaagacaa

SEQ ID NO: 5690 - RNA, 38 nt, Artificial Sequence
  Description of Artificial Sequence:  Enzymatic Nucleic acid
  misc_feature (31)..(31): n stands for inosine
caauggaacugaugaggccguuaggccgaangaagaca

SEQ ID NO: 5691 - RNA, 38 nt, Artificial Sequence
  Description of Artificial Sequence:  Enzymatic Nucleic acid
  misc_feature (31)..(31): n stands for inosine
aaaacaaucugaugaggccguuaggccgaanaauggaa

SEQ ID NO: 5692 - RNA, 38 nt, Artificial Sequence
  Description of Artificial Sequence:  Enzymatic Nucleic acid
  misc_feature (31)..(31): n stands for inosine
caaaacaacugaugaggccguuaggccgaangaaugga

SEQ ID NO: 5693 - RNA, 38 nt, Artificial Sequence
  Description of Artificial Sequence:  Enzymatic Nucleic acid
  misc_feature (31)..(31): n stands for inosine
gcauacugcugaugaggccguuaggccgaanuuucaaa

SEQ ID NO: 5694 - RNA, 38 nt, Artificial Sequence
  Description of Artificial Sequence:  Enzymatic Nucleic acid
  misc_feature (31)..(31): n stands for inosine
cggcauaccugaugaggccguuaggccgaanaguuuca

SEQ ID NO: 5695 - RNA, 38 nt, Artificial Sequence
  Description of Artificial Sequence:  Enzymatic Nucleic acid
  misc_feature (31)..(31): n stands for inosine
acaggggccugaugaggccguuaggccgaancauacug

SEQ ID NO: 5696 - RNA, 38 nt, Artificial Sequence
  Description of Artificial Sequence:  Enzymatic Nucleic acid
  misc_feature (31)..(31): n stands for inosine
aagacaggcugaugaggccguuaggccgaancggcaua

SEQ ID NO: 5697 - RNA, 38 nt, Artificial Sequence
  Description of Artificial Sequence:  Enzymatic Nucleic acid
  misc_feature (31)..(31): n stands for inosine
caagacagcugaugaggccguuaggccgaangcggcau

SEQ ID NO: 5698 - RNA, 38 nt, Artificial Sequence
  Description of Artificial Sequence:  Enzymatic Nucleic acid
  misc_feature (31)..(31): n stands for inosine
gcaagacacugaugaggccguuaggccgaanggcggca

SEQ ID NO: 5699 - RNA, 38 nt, Artificial Sequence
  Description of Artificial Sequence:  Enzymatic Nucleic acid
  misc_feature (31)..(31): n stands for inosine
agcaagaccugaugaggccguuaggccgaangggcggc

SEQ ID NO: 5700 - RNA, 38 nt, Artificial Sequence
  Description of Artificial Sequence:  Enzymatic Nucleic acid
  misc_feature (31)..(31): n stands for inosine
ugacagcacugaugaggccguuaggccgaanacagggg

SEQ ID NO: 5701 - RNA, 38 nt, Artificial Sequence
  Description of Artificial Sequence:  Enzymatic Nucleic acid
  misc_feature (31)..(31): n stands for inosine
uucaugaccugaugaggccguuaggccgaancaagaca

SEQ ID NO: 5702 - RNA, 38 nt, Artificial Sequence
  Description of Artificial Sequence:  Enzymatic Nucleic acid
  misc_feature (31)..(31): n stands for inosine
ugauuucacugaugaggccguuaggccgaanacagcaa

SEQ ID NO: 5703 - RNA, 38 nt, Artificial Sequence
  Description of Artificial Sequence:  Enzymatic Nucleic acid
  misc_feature (31)..(31): n stands for inosine
ucucuugccugaugaggccguuaggccgaanauuucau

SEQ ID NO: 5704 - RNA, 38 nt, Artificial Sequence
  Description of Artificial Sequence:  Enzymatic Nucleic acid
  misc_feature (31)..(31): n stands for inosine
uccucucucugaugaggccguuaggccgaancugauuu

SEQ ID NO: 5705 - RNA, 38 nt, Artificial Sequence
  Description of Artificial Sequence:  Enzymatic Nucleic acid
  misc_feature (31)..(31): n stands for inosine
auuugaugcugaugaggccguuaggccgaanucauccu

SEQ ID NO: 5706 - RNA, 38 nt, Artificial Sequence
  Description of Artificial Sequence:  Enzymatic Nucleic acid
  misc_feature (31)..(31): n stands for inosine
uuauuugacugaugaggccguuaggccgaanugucauc

SEQ ID NO: 5707 - RNA, 38 nt, Artificial Sequence
  Description of Artificial Sequence:  Enzymatic Nucleic acid
  misc_feature (31)..(31): n stands for inosine
uuauuauucugaugaggccguuaggccgaanauguguc

SEQ ID NO: 5708 - RNA, 38 nt, Artificial Sequence
  Description of Artificial Sequence:  Enzymatic Nucleic acid
  misc_feature (31)..(31): n stands for inosine
ggaauccgcugaugaggccguuaggccgaanuuauuau

SEQ ID NO: 5709 - RNA, 38 nt, Artificial Sequence
  Description of Artificial Sequence:  Enzymatic Nucleic acid
  misc_feature (31)..(31): n stands for inosine
ugugggcucugaugaggccguuaggccgaanaauccga

SEQ ID NO: 5710 - RNA, 38 nt, Artificial Sequence
  Description of Artificial Sequence:  Enzymatic Nucleic acid
  misc_feature (31)..(31): n stands for inosine
augugggccugaugaggccguuaggccgaangaauccg

SEQ ID NO: 5711 - RNA, 38 nt, Artificial Sequence
  Description of Artificial Sequence:  Enzymatic Nucleic acid
  misc_feature (31)..(31): n stands for inosine
ccaaugugcugaugaggccguuaggccgaancuggaau

SEQ ID NO: 5712 - RNA, 38 nt, Artificial Sequence
  Description of Artificial Sequence:  Enzymatic Nucleic acid
  misc_feature (31)..(31): n stands for inosine
uccaaugucugaugaggccguuaggccgaangcuggaa

SEQ ID NO: 5713 - RNA, 38 nt, Artificial Sequence
  Description of Artificial Sequence:  Enzymatic Nucleic acid
  misc_feature (31)..(31): n stands for inosine
auccaaugcugaugaggccguuaggccgaanggcugga

SEQ ID NO: 5714 - RNA, 38 nt, Artificial Sequence
  Description of Artificial Sequence:  Enzymatic Nucleic acid
  misc_feature (31)..(31): n stands for inosine
gaauccaacugaugaggccguuaggccgaanugggcug

SEQ ID NO: 5715 - RNA, 38 nt, Artificial Sequence
  Description of Artificial Sequence:  Enzymatic Nucleic acid
  misc_feature (31)..(31): n stands for inosine
aaugcugacugaugaggccguuaggccgaanaauccaa

SEQ ID NO: 5716 - RNA, 38 nt, Artificial Sequence
  Description of Artificial Sequence:  Enzymatic Nucleic acid
  misc_feature (31)..(31): n stands for inosine
ccaaaugccugaugaggccguuaggccgaanaugaauc

SEQ ID NO: 5717 - RNA, 38 nt, Artificial Sequence
  Description of Artificial Sequence:  Enzymatic Nucleic acid
  misc_feature (31)..(31): n stands for inosine
gguccaaacugaugaggccguuaggccgaancugauga

SEQ ID NO: 5718 - RNA, 38 nt, Artificial Sequence
  Description of Artificial Sequence:  Enzymatic Nucleic acid
  misc_feature (31)..(31): n stands for inosine
gggcuauucugaugaggccguuaggccgaanuccaaau

SEQ ID NO: 5719 - RNA, 38 nt, Artificial Sequence
  Description of Artificial Sequence:  Enzymatic Nucleic acid
  misc_feature (31)..(31): n stands for inosine
ugggcuaucugaugaggccguuaggccgaanguccaaa

SEQ ID NO: 5720 - RNA, 38 nt, Artificial Sequence
  Description of Artificial Sequence:  Enzymatic Nucleic acid
  misc_feature (31)..(31): n stands for inosine
cagcugugcugaugaggccguuaggccgaancuauugg

SEQ ID NO: 5721 - RNA, 38 nt, Artificial Sequence
  Description of Artificial Sequence:  Enzymatic Nucleic acid
  misc_feature (31)..(31): n stands for inosine
ucagcugucugaugaggccguuaggccgaangcuauug

SEQ ID NO: 5722 - RNA, 38 nt, Artificial Sequence
  Description of Artificial Sequence:  Enzymatic Nucleic acid
  misc_feature (31)..(31): n stands for inosine
cucagcugcugaugaggccguuaggccgaanggcuauu

SEQ ID NO: 5723 - RNA, 38 nt, Artificial Sequence
  Description of Artificial Sequence:  Enzymatic Nucleic acid
  misc_feature (31)..(31): n stands for inosine
uucucagccugaugaggccguuaggccgaanugggcua

SEQ ID NO: 5724 - RNA, 38 nt, Artificial Sequence
  Description of Artificial Sequence:  Enzymatic Nucleic acid
  misc_feature (31)..(31): n stands for inosine
acauucuccugaugaggccguuaggccgaancuguggg

SEQ ID NO: 5725 - RNA, 38 nt, Artificial Sequence
  Description of Artificial Sequence:  Enzymatic Nucleic acid
  misc_feature (31)..(31): n stands for inosine
uauccuuacugaugaggccguuaggccgaanuauucca

SEQ ID NO: 5726 - RNA, 38 nt, Artificial Sequence
  Description of Artificial Sequence:  Enzymatic Nucleic acid
  misc_feature (31)..(31): n stands for inosine
uuauccuucugaugaggccguuaggccgaanguauucc

SEQ ID NO: 5727 - RNA, 38 nt, Artificial Sequence
  Description of Artificial Sequence:  Enzymatic Nucleic acid
  misc_feature (31)..(31): n stands for inosine
aaaagcggcugaugaggccguuaggccgaanuuauccu

SEQ ID NO: 5728 - RNA, 38 nt, Artificial Sequence
  Description of Artificial Sequence:  Enzymatic Nucleic acid
  misc_feature (31)..(31): n stands for inosine
acaaaagccugaugaggccguuaggccgaanuguuauc

SEQ ID NO: 5729 - RNA, 38 nt, Artificial Sequence
  Description of Artificial Sequence:  Enzymatic Nucleic acid
  misc_feature (31)..(31): n stands for inosine
agaacaaacugaugaggccguuaggccgaancgguguu

SEQ ID NO: 5730 - RNA, 38 nt, Artificial Sequence
  Description of Artificial Sequence:  Enzymatic Nucleic acid
  misc_feature (31)..(31): n stands for inosine
uuuuugcgcugaugaggccguuaggccgaanaacaaaa

SEQ ID NO: 5731 - RNA, 38 nt, Artificial Sequence
  Description of Artificial Sequence:  Enzymatic Nucleic acid
  misc_feature (31)..(31): n stands for inosine
uacguuuucugaugaggccguuaggccgaancgagaac

SEQ ID NO: 5732 - RNA, 38 nt, Artificial Sequence
  Description of Artificial Sequence:  Enzymatic Nucleic acid
  misc_feature (31)..(31): n stands for inosine
aaauuaggcugaugaggccguuaggccgaanauacguu

SEQ ID NO: 5733 - RNA, 38 nt, Artificial Sequence
  Description of Artificial Sequence:  Enzymatic Nucleic acid
  misc_feature (31)..(31): n stands for inosine
ucaaauuacugaugaggccguuaggccgaanagauacg

SEQ ID NO: 5734 - RNA, 38 nt, Artificial Sequence
  Description of Artificial Sequence:  Enzymatic Nucleic acid
  misc_feature (31)..(31): n stands for inosine
cucaaauucugaugaggccguuaggccgaangagauac

SEQ ID NO: 5735 - RNA, 38 nt, Artificial Sequence
  Description of Artificial Sequence:  Enzymatic Nucleic acid
  misc_feature (31)..(31): n stands for inosine
uucaucugcugaugaggccguuaggccgaanccucaaa

SEQ ID NO: 5736 - RNA, 38 nt, Artificial Sequence
  Description of Artificial Sequence:  Enzymatic Nucleic acid
  misc_feature (31)..(31): n stands for inosine
auuucauccugaugaggccguuaggccgaanagccuca

SEQ ID NO: 5737 - RNA, 38 nt, Artificial Sequence
  Description of Artificial Sequence:  Enzymatic Nucleic acid
  misc_feature (31)..(31): n stands for inosine
ggaccugacugaugaggccguuaggccgaancauuuca

SEQ ID NO: 5738 - RNA, 38 nt, Artificial Sequence
  Description of Artificial Sequence:  Enzymatic Nucleic acid
  misc_feature (31)..(31): n stands for inosine
aaaggacccugaugaggccguuaggccgaanaugcauu

SEQ ID NO: 5739 - RNA, 38 nt, Artificial Sequence
  Description of Artificial Sequence:  Enzymatic Nucleic acid
  misc_feature (31)..(31): n stands for inosine
gccccaaacugaugaggccguuaggccgaanaccugau

SEQ ID NO: 5740 - RNA, 38 nt, Artificial Sequence
  Description of Artificial Sequence:  Enzymatic Nucleic acid
  misc_feature (31)..(31): n stands for inosine
ugccccaacugaugaggccguuaggccgaangaccuga

SEQ ID NO: 5741 - RNA, 38 nt, Artificial Sequence
  Description of Artificial Sequence:  Enzymatic Nucleic acid
  misc_feature (31)..(31): n stands for inosine
cugaucuacugaugaggccguuaggccgaanccccaaa

SEQ ID NO: 5742 - RNA, 38 nt, Artificial Sequence
  Description of Artificial Sequence:  Enzymatic Nucleic acid
  misc_feature (31)..(31): n stands for inosine
uagucuuccugaugaggccguuaggccgaanaucuaug

SEQ ID NO: 5743 - RNA, 38 nt, Artificial Sequence
  Description of Artificial Sequence:  Enzymatic Nucleic acid
  misc_feature (31)..(31): n stands for inosine
auuuuugucugaugaggccguuaggccgaanucuucug

SEQ ID NO: 5744 - RNA, 38 nt, Artificial Sequence
  Description of Artificial Sequence:  Enzymatic Nucleic acid
  misc_feature (31)..(31): n stands for inosine
uucauuuucugaugaggccguuaggccgaanuagucuu

SEQ ID NO: 5745 - RNA, 38 nt, Artificial Sequence
  Description of Artificial Sequence:  Enzymatic Nucleic acid
  misc_feature (31)..(31): n stands for inosine
uucagagccugaugaggccguuaggccgaancuucauu

SEQ ID NO: 5746 - RNA, 38 nt, Artificial Sequence
  Description of Artificial Sequence:  Enzymatic Nucleic acid
  misc_feature (31)..(31): n stands for inosine
gauuucagcugaugaggccguuaggccgaancagcuuc

SEQ ID NO: 5747 - RNA, 38 nt, Artificial Sequence
  Description of Artificial Sequence:  Enzymatic Nucleic acid
  misc_feature (31)..(31): n stands for inosine
gagauuuccugaugaggccguuaggccgaanagcagcu

SEQ ID NO: 5748 - RNA, 38 nt, Artificial Sequence
  Description of Artificial Sequence:  Enzymatic Nucleic acid
  misc_feature (31)..(31): n stands for inosine
gcuaaaggcugaugaggccguuaggccgaanauuucag

SEQ ID NO: 5749 - RNA, 38 nt, Artificial Sequence
  Description of Artificial Sequence:  Enzymatic Nucleic acid
  misc_feature (31)..(31): n stands for inosine
uggcuaaacugaugaggccguuaggccgaanagauuuc

SEQ ID NO: 5750 - RNA, 38 nt, Artificial Sequence
  Description of Artificial Sequence:  Enzymatic Nucleic acid
  misc_feature (31)..(31): n stands for inosine
auggcuaacugaugaggccguuaggccgaangagauuu

SEQ ID NO: 5751 - RNA, 38 nt, Artificial Sequence
  Description of Artificial Sequence:  Enzymatic Nucleic acid
  misc_feature (31)..(31): n stands for inosine
ggggugaucugaugaggccguuaggccgaancuaaagg

SEQ ID NO: 5752 - RNA, 38 nt, Artificial Sequence
  Description of Artificial Sequence:  Enzymatic Nucleic acid
  misc_feature (31)..(31): n stands for inosine
uggggugacugaugaggccguuaggccgaangcuaaag

SEQ ID NO: 5753 - RNA, 38 nt, Artificial Sequence
  Description of Artificial Sequence:  Enzymatic Nucleic acid
  misc_feature (31)..(31): n stands for inosine
gguuggggcugaugaggccguuaggccgaanauggcua

SEQ ID NO: 5754 - RNA, 38 nt, Artificial Sequence
  Description of Artificial Sequence:  Enzymatic Nucleic acid
  misc_feature (31)..(31): n stands for inosine
gggguuggcugaugaggccguuaggccgaanugauggc

SEQ ID NO: 5755 - RNA, 38 nt, Artificial Sequence
  Description of Artificial Sequence:  Enzymatic Nucleic acid
  misc_feature (31)..(31): n stands for inosine
ggggguugcugaugaggccguuaggccgaangugaugg

SEQ ID NO: 5756 - RNA, 38 nt, Artificial Sequence
  Description of Artificial Sequence:  Enzymatic Nucleic acid
  misc_feature (31)..(31): n stands for inosine
gggggguucugaugaggccguuaggccgaanggugaug

SEQ ID NO: 5757 - RNA, 38 nt, Artificial Sequence
  Description of Artificial Sequence:  Enzymatic Nucleic acid
  misc_feature (31)..(31): n stands for inosine
uggggggucugaugaggccguuaggccgaangggugau

SEQ ID NO: 5758 - RNA, 38 nt, Artificial Sequence
  Description of Artificial Sequence:  Enzymatic Nucleic acid
  misc_feature (31)..(31): n stands for inosine
uuuuggggcugaugaggccguuaggccgaanuuggggu

SEQ ID NO: 5759 - RNA, 38 nt, Artificial Sequence
  Description of Artificial Sequence:  Enzymatic Nucleic acid
  misc_feature (31)..(31): n stands for inosine
auuuugggcugaugaggccguuaggccgaanguugggg

SEQ ID NO: 5760 - RNA, 38 nt, Artificial Sequence
  Description of Artificial Sequence:  Enzymatic Nucleic acid
  misc_feature (31)..(31): n stands for inosine
aauuuuggcugaugaggccguuaggccgaangguuggg

SEQ ID NO: 5761 - RNA, 38 nt, Artificial Sequence
  Description of Artificial Sequence:  Enzymatic Nucleic acid
  misc_feature (31)..(31): n stands for inosine
uaauuuugcugaugaggccguuaggccgaanggguugg

SEQ ID NO: 5762 - RNA, 38 nt, Artificial Sequence
  Description of Artificial Sequence:  Enzymatic Nucleic acid
  misc_feature (31)..(31): n stands for inosine
cuaauuuucugaugaggccguuaggccgaangggguug

SEQ ID NO: 5763 - RNA, 38 nt, Artificial Sequence
  Description of Artificial Sequence:  Enzymatic Nucleic acid
  misc_feature (31)..(31): n stands for inosine
acuaauuucugaugaggccguuaggccgaanggggguu

SEQ ID NO: 5764 - RNA, 38 nt, Artificial Sequence
  Description of Artificial Sequence:  Enzymatic Nucleic acid
  misc_feature (31)..(31): n stands for inosine
cuuccauacugaugaggccguuaggccgaanuaacaca

SEQ ID NO: 5765 - RNA, 38 nt, Artificial Sequence
  Description of Artificial Sequence:  Enzymatic Nucleic acid
  misc_feature (31)..(31): n stands for inosine
guaaaaggcugaugaggccguuaggccgaanaaaacua

SEQ ID NO: 5766 - RNA, 38 nt, Artificial Sequence
  Description of Artificial Sequence:  Enzymatic Nucleic acid
  misc_feature (31)..(31): n stands for inosine
aaguaaaacugaugaggccguuaggccgaanagaaaac

SEQ ID NO: 5767 - RNA, 38 nt, Artificial Sequence
  Description of Artificial Sequence:  Enzymatic Nucleic acid
  misc_feature (31)..(31): n stands for inosine
gaaguaaacugaugaggccguuaggccgaangagaaaa

SEQ ID NO: 5768 - RNA, 38 nt, Artificial Sequence
  Description of Artificial Sequence:  Enzymatic Nucleic acid
  misc_feature (31)..(31): n stands for inosine
ugaagugacugaugaggccguuaggccgaanuaaaagg

SEQ ID NO: 5769 - RNA, 38 nt, Artificial Sequence
  Description of Artificial Sequence:  Enzymatic Nucleic acid
  misc_feature (31)..(31): n stands for inosine
uuuugaagcugaugaggccguuaggccgaanaaguaaa

SEQ ID NO: 5770 - RNA, 38 nt, Artificial Sequence
  Description of Artificial Sequence:  Enzymatic Nucleic acid
  misc_feature (31)..(31): n stands for inosine
gcuuuugacugaugaggccguuaggccgaanugaagua

SEQ ID NO: 5771 - RNA, 38 nt, Artificial Sequence
  Description of Artificial Sequence:  Enzymatic Nucleic acid
  misc_feature (31)..(31): n stands for inosine
aaagcuuucugaugaggccguuaggccgaanaagugaa

SEQ ID NO: 5772 - RNA, 38 nt, Artificial Sequence
  Description of Artificial Sequence:  Enzymatic Nucleic acid
  misc_feature (31)..(31): n stands for inosine
gaguaaaacugaugaggccguuaggccgaancuuuuga

SEQ ID NO: 5773 - RNA, 38 nt, Artificial Sequence
  Description of Artificial Sequence:  Enzymatic Nucleic acid
  misc_feature (31)..(31): n stands for inosine
acucuuugcugaugaggccguuaggccgaanuaaaaag

SEQ ID NO: 5774 - RNA, 38 nt, Artificial Sequence
  Description of Artificial Sequence:  Enzymatic Nucleic acid
  misc_feature (31)..(31): n stands for inosine
auacucuucugaugaggccguuaggccgaanaguaaaa

SEQ ID NO: 5775 - RNA, 38 nt, Artificial Sequence
  Description of Artificial Sequence:  Enzymatic Nucleic acid
  misc_feature (31)..(31): n stands for inosine
accuggagcugaugaggccguuaggccgaanaacauau

SEQ ID NO: 5776 - RNA, 38 nt, Artificial Sequence
  Description of Artificial Sequence:  Enzymatic Nucleic acid
  misc_feature (31)..(31): n stands for inosine
gaccuggacugaugaggccguuaggccgaangaacaua

SEQ ID NO: 5777 - RNA, 38 nt, Artificial Sequence
  Description of Artificial Sequence:  Enzymatic Nucleic acid
  misc_feature (31)..(31): n stands for inosine
ugaccuggcugaugaggccguuaggccgaanggaacau

SEQ ID NO: 5778 - RNA, 38 nt, Artificial Sequence
  Description of Artificial Sequence:  Enzymatic Nucleic acid
  misc_feature (31)..(31): n stands for inosine
gcugaccucugaugaggccguuaggccgaanagggaac

SEQ ID NO: 5779 - RNA, 38 nt, Artificial Sequence
  Description of Artificial Sequence:  Enzymatic Nucleic acid
  misc_feature (31)..(31): n stands for inosine
agcugacccugaugaggccguuaggccgaangagggaa

SEQ ID NO: 5780 - RNA, 38 nt, Artificial Sequence
  Description of Artificial Sequence:  Enzymatic Nucleic acid
  misc_feature (31)..(31): n stands for inosine
ggggcagccugaugaggccguuaggccgaanaccugga

SEQ ID NO: 5781 - RNA, 38 nt, Artificial Sequence
  Description of Artificial Sequence:  Enzymatic Nucleic acid
  misc_feature (31)..(31): n stands for inosine
uugggggccugaugaggccguuaggccgaancugaccu

SEQ ID NO: 5782 - RNA, 38 nt, Artificial Sequence
  Description of Artificial Sequence:  Enzymatic Nucleic acid
  misc_feature (31)..(31): n stands for inosine
gguuugggcugaugaggccguuaggccgaancagcuga

SEQ ID NO: 5783 - RNA, 38 nt, Artificial Sequence
  Description of Artificial Sequence:  Enzymatic Nucleic acid
  misc_feature (31)..(31): n stands for inosine
ggguuuggcugaugaggccguuaggccgaangcagcug

SEQ ID NO: 5784 - RNA, 38 nt, Artificial Sequence
  Description of Artificial Sequence:  Enzymatic Nucleic acid
  misc_feature (31)..(31): n stands for inosine
gggguuugcugaugaggccguuaggccgaanggcagcu

SEQ ID NO: 5785 - RNA, 38 nt, Artificial Sequence
  Description of Artificial Sequence:  Enzymatic Nucleic acid
  misc_feature (31)..(31): n stands for inosine
ggggguuucugaugaggccguuaggccgaangggcagc

SEQ ID NO: 5786 - RNA, 38 nt, Artificial Sequence
  Description of Artificial Sequence:  Enzymatic Nucleic acid
  misc_feature (31)..(31): n stands for inosine
aggggguucugaugaggccguuaggccgaanggggcag

SEQ ID NO: 5787 - RNA, 38 nt, Artificial Sequence
  Description of Artificial Sequence:  Enzymatic Nucleic acid
  misc_feature (31)..(31): n stands for inosine
aaggagggcugaugaggccguuaggccgaanuuugggg

SEQ ID NO: 5788 - RNA, 38 nt, Artificial Sequence
  Description of Artificial Sequence:  Enzymatic Nucleic acid
  misc_feature (31)..(31): n stands for inosine
uaaggaggcugaugaggccguuaggccgaanguuuggg

SEQ ID NO: 5789 - RNA, 38 nt, Artificial Sequence
  Description of Artificial Sequence:  Enzymatic Nucleic acid
  misc_feature (31)..(31): n stands for inosine
guaaggagcugaugaggccguuaggccgaangguuugg

SEQ ID NO: 5790 - RNA, 38 nt, Artificial Sequence
  Description of Artificial Sequence:  Enzymatic Nucleic acid
  misc_feature (31)..(31): n stands for inosine
cguaaggacugaugaggccguuaggccgaanggguuug

SEQ ID NO: 5791 - RNA, 38 nt, Artificial Sequence
  Description of Artificial Sequence:  Enzymatic Nucleic acid
  misc_feature (31)..(31): n stands for inosine
gcguaaggcugaugaggccguuaggccgaangggguuu

SEQ ID NO: 5792 - RNA, 38 nt, Artificial Sequence
  Description of Artificial Sequence:  Enzymatic Nucleic acid
  misc_feature (31)..(31): n stands for inosine
aagcguaacugaugaggccguuaggccgaanagggggu

SEQ ID NO: 5793 - RNA, 38 nt, Artificial Sequence
  Description of Artificial Sequence:  Enzymatic Nucleic acid
  misc_feature (31)..(31): n stands for inosine
aaagcguacugaugaggccguuaggccgaangaggggg

SEQ ID NO: 5794 - RNA, 38 nt, Artificial Sequence
  Description of Artificial Sequence:  Enzymatic Nucleic acid
  misc_feature (31)..(31): n stands for inosine
ugugacaacugaugaggccguuaggccgaancguaagg

SEQ ID NO: 5795 - RNA, 38 nt, Artificial Sequence
  Description of Artificial Sequence:  Enzymatic Nucleic acid
  misc_feature (31)..(31): n stands for inosine
uuuuugugcugaugaggccguuaggccgaanacaaagc

SEQ ID NO: 5796 - RNA, 38 nt, Artificial Sequence
  Description of Artificial Sequence:  Enzymatic Nucleic acid
  misc_feature (31)..(31): n stands for inosine
acuuuuugcugaugaggccguuaggccgaanugacaaa

SEQ ID NO: 5797 - RNA, 38 nt, Artificial Sequence
  Description of Artificial Sequence:  Enzymatic Nucleic acid
  misc_feature (31)..(31): n stands for inosine
acacuuuucugaugaggccguuaggccgaanugugaca

SEQ ID NO: 5798 - RNA, 38 nt, Artificial Sequence
  Description of Artificial Sequence:  Enzymatic Nucleic acid
  misc_feature (31)..(31): n stands for inosine
caaggcagcugaugaggccguuaggccgaanacacuuu

SEQ ID NO: 5799 - RNA, 38 nt, Artificial Sequence
  Description of Artificial Sequence:  Enzymatic Nucleic acid
  misc_feature (31)..(31): n stands for inosine
cucaaggccugaugaggccguuaggccgaanagacacu

SEQ ID NO: 5800 - RNA, 38 nt, Artificial Sequence
  Description of Artificial Sequence:  Enzymatic Nucleic acid
  misc_feature (31)..(31): n stands for inosine
ugacucaacugaugaggccguuaggccgaancagagac

SEQ ID NO: 5801 - RNA, 38 nt, Artificial Sequence
  Description of Artificial Sequence:  Enzymatic Nucleic acid
  misc_feature (31)..(31): n stands for inosine
augacucacugaugaggccguuaggccgaangcagaga

SEQ ID NO: 5802 - RNA, 38 nt, Artificial Sequence
  Description of Artificial Sequence:  Enzymatic Nucleic acid
  misc_feature (31)..(31): n stands for inosine
ugaauagacugaugaggccguuaggccgaanacucaag

SEQ ID NO: 5803 - RNA, 38 nt, Artificial Sequence
  Description of Artificial Sequence:  Enzymatic Nucleic acid
  misc_feature (31)..(31): n stands for inosine
gcuugaaucugaugaggccguuaggccgaanaugacuc

SEQ ID NO: 5804 - RNA, 38 nt, Artificial Sequence
  Description of Artificial Sequence:  Enzymatic Nucleic acid
  misc_feature (31)..(31): n stands for inosine
uaagugcucugaugaggccguuaggccgaanaauagau

SEQ ID NO: 5805 - RNA, 38 nt, Artificial Sequence
  Description of Artificial Sequence:  Enzymatic Nucleic acid
  misc_feature (31)..(31): n stands for inosine
gcuguaagcugaugaggccguuaggccgaancuugaau

SEQ ID NO: 5806 - RNA, 38 nt, Artificial Sequence
  Description of Artificial Sequence:  Enzymatic Nucleic acid
  misc_feature (31)..(31): n stands for inosine
gagcuguacugaugaggccguuaggccgaanugcuuga

SEQ ID NO: 5807 - RNA, 38 nt, Artificial Sequence
  Description of Artificial Sequence:  Enzymatic Nucleic acid
  misc_feature (31)..(31): n stands for inosine
gccagagccugaugaggccguuaggccgaanuaagugc

SEQ ID NO: 5808 - RNA, 38 nt, Artificial Sequence
  Description of Artificial Sequence:  Enzymatic Nucleic acid
  misc_feature (31)..(31): n stands for inosine
guggccagcugaugaggccguuaggccgaancuguaag

SEQ ID NO: 5809 - RNA, 38 nt, Artificial Sequence
  Description of Artificial Sequence:  Enzymatic Nucleic acid
  misc_feature (31)..(31): n stands for inosine
uuguggcccugaugaggccguuaggccgaanagcugua

SEQ ID NO: 5810 - RNA, 38 nt, Artificial Sequence
  Description of Artificial Sequence:  Enzymatic Nucleic acid
  misc_feature (31)..(31): n stands for inosine
ccuguugucugaugaggccguuaggccgaanccagagc

SEQ ID NO: 5811 - RNA, 38 nt, Artificial Sequence
  Description of Artificial Sequence:  Enzymatic Nucleic acid
  misc_feature (31)..(31): n stands for inosine
cccuguugcugaugaggccguuaggccgaangccagag

SEQ ID NO: 5812 - RNA, 38 nt, Artificial Sequence
  Description of Artificial Sequence:  Enzymatic Nucleic acid
  misc_feature (31)..(31): n stands for inosine
ugcccugucugaugaggccguuaggccgaanuggccag

SEQ ID NO: 5813 - RNA, 38 nt, Artificial Sequence
  Description of Artificial Sequence:  Enzymatic Nucleic acid
  misc_feature (31)..(31): n stands for inosine
aaaugccccugaugaggccguuaggccgaanuuguggc

SEQ ID NO: 5814 - RNA, 38 nt, Artificial Sequence
  Description of Artificial Sequence:  Enzymatic Nucleic acid
  misc_feature (31)..(31): n stands for inosine
cuguaaaacugaugaggccguuaggccgaancccuguu

SEQ ID NO: 5815 - RNA, 38 nt, Artificial Sequence
  Description of Artificial Sequence:  Enzymatic Nucleic acid
  misc_feature (31)..(31): n stands for inosine
uucgcacccugaugaggccguuaggccgaanuaaaaug

SEQ ID NO: 5816 - RNA, 38 nt, Artificial Sequence
  Description of Artificial Sequence:  Enzymatic Nucleic acid
  misc_feature (31)..(31): n stands for inosine
aaugcuaccugaugaggccguuaggccgaanucauucg

SEQ ID NO: 5817 - RNA, 38 nt, Artificial Sequence
  Description of Artificial Sequence:  Enzymatic Nucleic acid
  misc_feature (31)..(31): n stands for inosine
acucauaacugaugaggccguuaggccgaancuacugu

SEQ ID NO: 5818 - RNA, 38 nt, Artificial Sequence
  Description of Artificial Sequence:  Enzymatic Nucleic acid
  misc_feature (31)..(31): n stands for inosine
uuacuacccugaugaggccguuaggccgaanaauucac

SEQ ID NO: 5819 - RNA, 38 nt, Artificial Sequence
  Description of Artificial Sequence:  Enzymatic Nucleic acid
  misc_feature (31)..(31): n stands for inosine
caaacccucugaugaggccguuaggccgaanuuucaua

SEQ ID NO: 5820 - RNA, 38 nt, Artificial Sequence
  Description of Artificial Sequence:  Enzymatic Nucleic acid
  misc_feature (31)..(31): n stands for inosine
guugugaacugaugaggccguuaggccgaancauuauc

SEQ ID NO: 5821 - RNA, 38 nt, Artificial Sequence
  Description of Artificial Sequence:  Enzymatic Nucleic acid
  misc_feature (31)..(31): n stands for inosine
aaauguugcugaugaggccguuaggccgaanaaagcau

SEQ ID NO: 5822 - RNA, 38 nt, Artificial Sequence
  Description of Artificial Sequence:  Enzymatic Nucleic acid
  misc_feature (31)..(31): n stands for inosine
gcaaaugucugaugaggccguuaggccgaanugaaagc

SEQ ID NO: 5823 - RNA, 38 nt, Artificial Sequence
  Description of Artificial Sequence:  Enzymatic Nucleic acid
  misc_feature (31)..(31): n stands for inosine
ucugcaaacugaugaggccguuaggccgaanuugugaa

SEQ ID NO: 5824 - RNA, 38 nt, Artificial Sequence
  Description of Artificial Sequence:  Enzymatic Nucleic acid
  misc_feature (31)..(31): n stands for inosine
aaaacauccugaugaggccguuaggccgaancaaaugu

SEQ ID NO: 5825 - RNA, 38 nt, Artificial Sequence
  Description of Artificial Sequence:  Enzymatic Nucleic acid
  misc_feature (31)..(31): n stands for inosine
uuuaggaacugaugaggccguuaggccgaanaacuuuu

SEQ ID NO: 5826 - RNA, 38 nt, Artificial Sequence
  Description of Artificial Sequence:  Enzymatic Nucleic acid
  misc_feature (31)..(31): n stands for inosine
uuuuaggacugaugaggccguuaggccgaangaacuuu

SEQ ID NO: 5827 - RNA, 38 nt, Artificial Sequence
  Description of Artificial Sequence:  Enzymatic Nucleic acid
  misc_feature (31)..(31): n stands for inosine
uuauuuuacugaugaggccguuaggccgaanaaggaac

SEQ ID NO: 5828 - RNA, 38 nt, Artificial Sequence
  Description of Artificial Sequence:  Enzymatic Nucleic acid
  misc_feature (31)..(31): n stands for inosine
auuauuuucugaugaggccguuaggccgaangaaggaa

SEQ ID NO: 5829 - RNA, 38 nt, Artificial Sequence
  Description of Artificial Sequence:  Enzymatic Nucleic acid
  misc_feature (31)..(31): n stands for inosine
aauuguagcugaugaggccguuaggccgaanaaauuau

SEQ ID NO: 5830 - RNA, 38 nt, Artificial Sequence
  Description of Artificial Sequence:  Enzymatic Nucleic acid
  misc_feature (31)..(31): n stands for inosine
ccaauugucugaugaggccguuaggccgaanagaaauu

SEQ ID NO: 5831 - RNA, 38 nt, Artificial Sequence
  Description of Artificial Sequence:  Enzymatic Nucleic acid
  misc_feature (31)..(31): n stands for inosine
cuuccaaucugaugaggccguuaggccgaanuagagaa

SEQ ID NO: 5832 - RNA, 38 nt, Artificial Sequence
  Description of Artificial Sequence:  Enzymatic Nucleic acid
  misc_feature (31)..(31): n stands for inosine
uaacuagccugaugaggccguuaggccgaanaaucuuc

SEQ ID NO: 5833 - RNA, 38 nt, Artificial Sequence
  Description of Artificial Sequence:  Enzymatic Nucleic acid
  misc_feature (31)..(31): n stands for inosine
uccuaacucugaugaggccguuaggccgaancugaauc

SEQ ID NO: 5834 - RNA, 38 nt, Artificial Sequence
  Description of Artificial Sequence:  Enzymatic Nucleic acid
  misc_feature (31)..(31): n stands for inosine
aaaaaaugcugaugaggccguuaggccgaancuccuaa

SEQ ID NO: 5835 - RNA, 38 nt, Artificial Sequence
  Description of Artificial Sequence:  Enzymatic Nucleic acid
  misc_feature (31)..(31): n stands for inosine
gaaaaaaucugaugaggccguuaggccgaangcuccua

SEQ ID NO: 5836 - RNA, 38 nt, Artificial Sequence
  Description of Artificial Sequence:  Enzymatic Nucleic acid
  misc_feature (31)..(31): n stands for inosine
ggaaaaaacugaugaggccguuaggccgaanggcuccu

SEQ ID NO: 5837 - RNA, 38 nt, Artificial Sequence
  Description of Artificial Sequence:  Enzymatic Nucleic acid
  misc_feature (31)..(31): n stands for inosine
acagauuacugaugaggccguuaggccgaanaaaaaau

SEQ ID NO: 5838 - RNA, 38 nt, Artificial Sequence
  Description of Artificial Sequence:  Enzymatic Nucleic acid
  misc_feature (31)..(31): n stands for inosine
cacagauucugaugaggccguuaggccgaangaaaaaa

SEQ ID NO: 5839 - RNA, 38 nt, Artificial Sequence
  Description of Artificial Sequence:  Enzymatic Nucleic acid
  misc_feature (31)..(31): n stands for inosine
gcacacaccugaugaggccguuaggccgaanauuagga

SEQ ID NO: 5840 - RNA, 38 nt, Artificial Sequence
  Description of Artificial Sequence:  Enzymatic Nucleic acid
  misc_feature (31)..(31): n stands for inosine
gguuacagcugaugaggccguuaggccgaancacacac

SEQ ID NO: 5841 - RNA, 38 nt, Artificial Sequence
  Description of Artificial Sequence:  Enzymatic Nucleic acid
  misc_feature (31)..(31): n stands for inosine
agguuacacugaugaggccguuaggccgaangcacaca

SEQ ID NO: 5842 - RNA, 38 nt, Artificial Sequence
  Description of Artificial Sequence:  Enzymatic Nucleic acid
  misc_feature (31)..(31): n stands for inosine
cagguuaccugaugaggccguuaggccgaanggcacac

SEQ ID NO: 5843 - RNA, 38 nt, Artificial Sequence
  Description of Artificial Sequence:  Enzymatic Nucleic acid
  misc_feature (31)..(31): n stands for inosine
accagucacugaugaggccguuaggccgaanuuacagg

SEQ ID NO: 5844 - RNA, 38 nt, Artificial Sequence
  Description of Artificial Sequence:  Enzymatic Nucleic acid
  misc_feature (31)..(31): n stands for inosine
aaccaguccugaugaggccguuaggccgaanguuacag

SEQ ID NO: 5845 - RNA, 38 nt, Artificial Sequence
  Description of Artificial Sequence:  Enzymatic Nucleic acid
  misc_feature (31)..(31): n stands for inosine
uguuaacccugaugaggccguuaggccgaanucagguu

SEQ ID NO: 5846 - RNA, 38 nt, Artificial Sequence
  Description of Artificial Sequence:  Enzymatic Nucleic acid
  misc_feature (31)..(31): n stands for inosine
aggacugccugaugaggccguuaggccgaanuuaacca

SEQ ID NO: 5847 - RNA, 38 nt, Artificial Sequence
  Description of Artificial Sequence:  Enzymatic Nucleic acid
  misc_feature (31)..(31): n stands for inosine
caaaggaccugaugaggccguuaggccgaancuguuaa

SEQ ID NO: 5848 - RNA, 38 nt, Artificial Sequence
  Description of Artificial Sequence:  Enzymatic Nucleic acid
  misc_feature (31)..(31): n stands for inosine
uuuacaaacugaugaggccguuaggccgaanacugcug

SEQ ID NO: 5849 - RNA, 38 nt, Artificial Sequence
  Description of Artificial Sequence:  Enzymatic Nucleic acid
  misc_feature (31)..(31): n stands for inosine
guuuacaacugaugaggccguuaggccgaangacugcu

SEQ ID NO: 5850 - RNA, 38 nt, Artificial Sequence
  Description of Artificial Sequence:  Enzymatic Nucleic acid
  misc_feature (31)..(31): n stands for inosine
uaaaacaccugaugaggccguuaggccgaanuuuacaa

SEQ ID NO: 5851 - RNA, 38 nt, Artificial Sequence
  Description of Artificial Sequence:  Enzymatic Nucleic acid
  misc_feature (31)..(31): n stands for inosine
acuaggagcugaugaggccguuaggccgaanuuuaaaa

SEQ ID NO: 5852 - RNA, 38 nt, Artificial Sequence
  Description of Artificial Sequence:  Enzymatic Nucleic acid
  misc_feature (31)..(31): n stands for inosine
ugacuaggcugaugaggccguuaggccgaanaguuuaa

SEQ ID NO: 5853 - RNA, 38 nt, Artificial Sequence
  Description of Artificial Sequence:  Enzymatic Nucleic acid
  misc_feature (31)..(31): n stands for inosine
auugacuacugaugaggccguuaggccgaanagaguuu

SEQ ID NO: 5854 - RNA, 38 nt, Artificial Sequence
  Description of Artificial Sequence:  Enzymatic Nucleic acid
  misc_feature (31)..(31): n stands for inosine
uauugacucugaugaggccguuaggccgaangagaguu

SEQ ID NO: 5855 - RNA, 38 nt, Artificial Sequence
  Description of Artificial Sequence:  Enzymatic Nucleic acid
  misc_feature (31)..(31): n stands for inosine
guggauaucugaugaggccguuaggccgaanacuagga

SEQ ID NO: 5856 - RNA, 38 nt, Artificial Sequence
  Description of Artificial Sequence:  Enzymatic Nucleic acid
  misc_feature (31)..(31): n stands for inosine
gauggggucugaugaggccguuaggccgaanauauuga

SEQ ID NO: 5857 - RNA, 38 nt, Artificial Sequence
  Description of Artificial Sequence:  Enzymatic Nucleic acid
  misc_feature (31)..(31): n stands for inosine
ggauggggcugaugaggccguuaggccgaangauauug

SEQ ID NO: 5858 - RNA, 38 nt, Artificial Sequence
  Description of Artificial Sequence:  Enzymatic Nucleic acid
  misc_feature (31)..(31): n stands for inosine
uuggauggcugaugaggccguuaggccgaanuggauau

SEQ ID NO: 5859 - RNA, 38 nt, Artificial Sequence
  Description of Artificial Sequence:  Enzymatic Nucleic acid
  misc_feature (31)..(31): n stands for inosine
auuggaugcugaugaggccguuaggccgaanguggaua

SEQ ID NO: 5860 - RNA, 38 nt, Artificial Sequence
  Description of Artificial Sequence:  Enzymatic Nucleic acid
  misc_feature (31)..(31): n stands for inosine
aauuggaucugaugaggccguuaggccgaangguggau

SEQ ID NO: 5861 - RNA, 38 nt, Artificial Sequence
  Description of Artificial Sequence:  Enzymatic Nucleic acid
  misc_feature (31)..(31): n stands for inosine
aaauuggacugaugaggccguuaggccgaangggugga

SEQ ID NO: 5862 - RNA, 38 nt, Artificial Sequence
  Description of Artificial Sequence:  Enzymatic Nucleic acid
  misc_feature (31)..(31): n stands for inosine
gauaaauucugaugaggccguuaggccgaanauggggu

SEQ ID NO: 5863 - RNA, 38 nt, Artificial Sequence
  Description of Artificial Sequence:  Enzymatic Nucleic acid
  misc_feature (31)..(31): n stands for inosine
ugauaaaucugaugaggccguuaggccgaangaugggg

SEQ ID NO: 5864 - RNA, 38 nt, Artificial Sequence
  Description of Artificial Sequence:  Enzymatic Nucleic acid
  misc_feature (31)..(31): n stands for inosine
uucuuccucugaugaggccguuaggccgaanauaaauu

SEQ ID NO: 5865 - RNA, 38 nt, Artificial Sequence
  Description of Artificial Sequence:  Enzymatic Nucleic acid
  misc_feature (31)..(31): n stands for inosine
auauuuuccugaugaggccguuaggccgaanaaccauu

SEQ ID NO: 5866 - RNA, 38 nt, Artificial Sequence
  Description of Artificial Sequence:  Enzymatic Nucleic acid
  misc_feature (31)..(31): n stands for inosine
cuguaggccugaugaggccguuaggccgaanaaaauau

SEQ ID NO: 5867 - RNA, 38 nt, Artificial Sequence
  Description of Artificial Sequence:  Enzymatic Nucleic acid
  misc_feature (31)..(31): n stands for inosine
uaacuguacugaugaggccguuaggccgaancugaaaa

SEQ ID NO: 5868 - RNA, 38 nt, Artificial Sequence
  Description of Artificial Sequence:  Enzymatic Nucleic acid
  misc_feature (31)..(31): n stands for inosine
auaacugucugaugaggccguuaggccgaangcugaaa

SEQ ID NO: 5869 - RNA, 38 nt, Artificial Sequence
  Description of Artificial Sequence:  Enzymatic Nucleic acid
  misc_feature (31)..(31): n stands for inosine
aacauaaccugaugaggccguuaggccgaanuaggcug

SEQ ID NO: 5870 - RNA, 38 nt, Artificial Sequence
  Description of Artificial Sequence:  Enzymatic Nucleic acid
  misc_feature (31)..(31): n stands for inosine
ugugugaccugaugaggccguuaggccgaanaacauaa

SEQ ID NO: 5871 - RNA, 38 nt, Artificial Sequence
  Description of Artificial Sequence:  Enzymatic Nucleic acid
  misc_feature (31)..(31): n stands for inosine
ugugugugcugaugaggccguuaggccgaanacugaac

SEQ ID NO: 5872 - RNA, 38 nt, Artificial Sequence
  Description of Artificial Sequence:  Enzymatic Nucleic acid
  misc_feature (31)..(31): n stands for inosine
uaugugugcugaugaggccguuaggccgaanugacuga

SEQ ID NO: 5873 - RNA, 38 nt, Artificial Sequence
  Description of Artificial Sequence:  Enzymatic Nucleic acid
  misc_feature (31)..(31): n stands for inosine
uguaugugcugaugaggccguuaggccgaanugugacu

SEQ ID NO: 5874 - RNA, 38 nt, Artificial Sequence
  Description of Artificial Sequence:  Enzymatic Nucleic acid
  misc_feature (31)..(31): n stands for inosine
uuuguaugcugaugaggccguuaggccgaanuguguga

SEQ ID NO: 5875 - RNA, 38 nt, Artificial Sequence
  Description of Artificial Sequence:  Enzymatic Nucleic acid
  misc_feature (31)..(31): n stands for inosine
auuuuguacugaugaggccguuaggccgaanugugugu

SEQ ID NO: 5876 - RNA, 38 nt, Artificial Sequence
  Description of Artificial Sequence:  Enzymatic Nucleic acid
  misc_feature (31)..(31): n stands for inosine
gaacauuucugaugaggccguuaggccgaanuaugugu

SEQ ID NO: 5877 - RNA, 38 nt, Artificial Sequence
  Description of Artificial Sequence:  Enzymatic Nucleic acid
  misc_feature (31)..(31): n stands for inosine
aagcaaaacugaugaggccguuaggccgaanaacauuu

SEQ ID NO: 5878 - RNA, 38 nt, Artificial Sequence
  Description of Artificial Sequence:  Enzymatic Nucleic acid
  misc_feature (31)..(31): n stands for inosine
aaagcaaacugaugaggccguuaggccgaangaacauu

SEQ ID NO: 5879 - RNA, 38 nt, Artificial Sequence
  Description of Artificial Sequence:  Enzymatic Nucleic acid
  misc_feature (31)..(31): n stands for inosine
acuuuaaacugaugaggccguuaggccgaancaaaagg

SEQ ID NO: 5880 - RNA, 38 nt, Artificial Sequence
  Description of Artificial Sequence:  Enzymatic Nucleic acid
  misc_feature (31)..(31): n stands for inosine
gaucugggcugaugaggccguuaggccgaanucaaaaa

SEQ ID NO: 5881 - RNA, 38 nt, Artificial Sequence
  Description of Artificial Sequence:  Enzymatic Nucleic acid
  misc_feature (31)..(31): n stands for inosine
cugaucugcugaugaggccguuaggccgaanagucaaa

SEQ ID NO: 5882 - RNA, 38 nt, Artificial Sequence
  Description of Artificial Sequence:  Enzymatic Nucleic acid
  misc_feature (31)..(31): n stands for inosine
acugaucucugaugaggccguuaggccgaangagucaa

SEQ ID NO: 5883 - RNA, 38 nt, Artificial Sequence
  Description of Artificial Sequence:  Enzymatic Nucleic acid
  misc_feature (31)..(31): n stands for inosine
gacugauccugaugaggccguuaggccgaanggaguca

SEQ ID NO: 5884 - RNA, 38 nt, Artificial Sequence
  Description of Artificial Sequence:  Enzymatic Nucleic acid
  misc_feature (31)..(31): n stands for inosine
gcucugaccugaugaggccguuaggccgaanaucuggg

SEQ ID NO: 5885 - RNA, 38 nt, Artificial Sequence
  Description of Artificial Sequence:  Enzymatic Nucleic acid
  misc_feature (31)..(31): n stands for inosine
aggggcuccugaugaggccguuaggccgaanacugauc

SEQ ID NO: 5886 - RNA, 38 nt, Artificial Sequence
  Description of Artificial Sequence:  Enzymatic Nucleic acid
  misc_feature (31)..(31): n stands for inosine
gcuguaggcugaugaggccguuaggccgaancucugac

SEQ ID NO: 5887 - RNA, 38 nt, Artificial Sequence
  Description of Artificial Sequence:  Enzymatic Nucleic acid
  misc_feature (31)..(31): n stands for inosine
ugcuguagcugaugaggccguuaggccgaangcucuga

SEQ ID NO: 5888 - RNA, 38 nt, Artificial Sequence
  Description of Artificial Sequence:  Enzymatic Nucleic acid
  misc_feature (31)..(31): n stands for inosine
augcuguacugaugaggccguuaggccgaanggcucug

SEQ ID NO: 5889 - RNA, 38 nt, Artificial Sequence
  Description of Artificial Sequence:  Enzymatic Nucleic acid
  misc_feature (31)..(31): n stands for inosine
aaugcugucugaugaggccguuaggccgaangggcucu

SEQ ID NO: 5890 - RNA, 38 nt, Artificial Sequence
  Description of Artificial Sequence:  Enzymatic Nucleic acid
  misc_feature (31)..(31): n stands for inosine
aacaaugccugaugaggccguuaggccgaanuaggggc

SEQ ID NO: 5891 - RNA, 38 nt, Artificial Sequence
  Description of Artificial Sequence:  Enzymatic Nucleic acid
  misc_feature (31)..(31): n stands for inosine
cuuaacaacugaugaggccguuaggccgaancuguagg

SEQ ID NO: 5892 - RNA, 38 nt, Artificial Sequence
  Description of Artificial Sequence:  Enzymatic Nucleic acid
  misc_feature (31)..(31): n stands for inosine
uuucauugcugaugaggccguuaggccgaanacaaaaa

SEQ ID NO: 5893 - RNA, 38 nt, Artificial Sequence
  Description of Artificial Sequence:  Enzymatic Nucleic acid
  misc_feature (31)..(31): n stands for inosine
auuuucaucugaugaggccguuaggccgaanagacaaa

SEQ ID NO: 5894 - RNA, 38 nt, Artificial Sequence
  Description of Artificial Sequence:  Enzymatic Nucleic acid
  misc_feature (31)..(31): n stands for inosine
augaauaucugaugaggccguuaggccgaanuuuuauu

SEQ ID NO: 5895 - RNA, 37 nt, Artificial Sequence
  Description of Artificial Sequence:  Enzymatic Nucleic acid
cuccggcggccgaaaggcgagugaggucuagcgcggc

SEQ ID NO: 5896 - RNA, 37 nt, Artificial Sequence
  Description of Artificial Sequence:  Enzymatic Nucleic acid
gacuccgggccgaaaggcgagugaggucugcagcgcg

SEQ ID NO: 5897 - RNA, 37 nt, Artificial Sequence
  Description of Artificial Sequence:  Enzymatic Nucleic acid
gcucgggagccgaaaggcgagugaggucuuccggcgc

SEQ ID NO: 5898 - RNA, 37 nt, Artificial Sequence
  Description of Artificial Sequence:  Enzymatic Nucleic acid
ggggcuaggccgaaaggcgagugaggucuucgggacu

SEQ ID NO: 5899 - RNA, 37 nt, Artificial Sequence
  Description of Artificial Sequence:  Enzymatic Nucleic acid
cgccgggggccgaaaggcgagugaggucuuagcucgg

SEQ ID NO: 5900 - RNA, 37 nt, Artificial Sequence
  Description of Artificial Sequence:  Enzymatic Nucleic acid
cggcggcggccgaaaggcgagugaggucucggggcua

SEQ ID NO: 5901 - RNA, 37 nt, Artificial Sequence
  Description of Artificial Sequence:  Enzymatic Nucleic acid
ggcggcgggccgaaaggcgagugaggucugccggggc

SEQ ID NO: 5902 - RNA, 37 nt, Artificial Sequence
  Description of Artificial Sequence:  Enzymatic Nucleic acid
ggcggcgggccgaaaggcgagugaggucuggcgccgg

SEQ ID NO: 5903 - RNA, 37 nt, Artificial Sequence
  Description of Artificial Sequence:  Enzymatic Nucleic acid
cugggcgggccgaaaggcgagugaggucuggcggcgc

SEQ ID NO: 5904 - RNA, 37 nt, Artificial Sequence
  Description of Artificial Sequence:  Enzymatic Nucleic acid
ggucuggggccgaaaggcgagugaggucuggcggcgg

SEQ ID NO: 5905 - RNA, 37 nt, Artificial Sequence
  Description of Artificial Sequence:  Enzymatic Nucleic acid
cgaggugggccgaaaggcgagugaggucucugucguc

SEQ ID NO: 5906 - RNA, 37 nt, Artificial Sequence
  Description of Artificial Sequence:  Enzymatic Nucleic acid
gacgccgagccgaaaggcgagugaggucugagguggc

SEQ ID NO: 5907 - RNA, 37 nt, Artificial Sequence
  Description of Artificial Sequence:  Enzymatic Nucleic acid
ggcggacggccgaaaggcgagugaggucucgacgagg

SEQ ID NO: 5908 - RNA, 37 nt, Artificial Sequence
  Description of Artificial Sequence:  Enzymatic Nucleic acid
cgggcggagccgaaaggcgagugaggucugccgacga

SEQ ID NO: 5909 - RNA, 37 nt, Artificial Sequence
  Description of Artificial Sequence:  Enzymatic Nucleic acid
gacucggggccgaaaggcgagugaggucuggacgccg

SEQ ID NO: 5910 - RNA, 37 nt, Artificial Sequence
  Description of Artificial Sequence:  Enzymatic Nucleic acid
ggcggggagccgaaaggcgagugaggucuucgggcgg

SEQ ID NO: 5911 - RNA, 37 nt, Artificial Sequence
  Description of Artificial Sequence:  Enzymatic Nucleic acid
cggcgagggccgaaaggcgagugaggucuggggacuc

SEQ ID NO: 5912 - RNA, 37 nt, Artificial Sequence
  Description of Artificial Sequence:  Enzymatic Nucleic acid
guuggcgggccgaaaggcgagugaggucugaggcggg

SEQ ID NO: 5913 - RNA, 37 nt, Artificial Sequence
  Description of Artificial Sequence:  Enzymatic Nucleic acid
ggcguugggccgaaaggcgagugaggucuggcgaggc

SEQ ID NO: 5914 - RNA, 37 nt, Artificial Sequence
  Description of Artificial Sequence:  Enzymatic Nucleic acid
gguugugggccgaaaggcgagugaggucuguuggcgg

SEQ ID NO: 5915 - RNA, 37 nt, Artificial Sequence
  Description of Artificial Sequence:  Enzymatic Nucleic acid
gccgugcggccgaaaggcgagugaggucuggugguug

SEQ ID NO: 5916 - RNA, 37 nt, Artificial Sequence
  Description of Artificial Sequence:  Enzymatic Nucleic acid
gggccguggccgaaaggcgagugaggucugcgguggu

SEQ ID NO: 5917 - RNA, 37 nt, Artificial Sequence
  Description of Artificial Sequence:  Enzymatic Nucleic acid
ucaggggggccgaaaggcgagugaggucucgugcgcg

SEQ ID NO: 5918 - RNA, 37 nt, Artificial Sequence
  Description of Artificial Sequence:  Enzymatic Nucleic acid
auacuggagccgaaaggcgagugaggucuggagucag

SEQ ID NO: 5919 - RNA, 37 nt, Artificial Sequence
  Description of Artificial Sequence:  Enzymatic Nucleic acid
gaucaauagccgaaaggcgagugaggucuuggacgga

SEQ ID NO: 5920 - RNA, 37 nt, Artificial Sequence
  Description of Artificial Sequence:  Enzymatic Nucleic acid
cgcuccgggccgaaaggcgagugaggucuucucccga

SEQ ID NO: 5921 - RNA, 37 nt, Artificial Sequence
  Description of Artificial Sequence:  Enzymatic Nucleic acid
agagcucggccgaaaggcgagugaggucuuccggcuc

SEQ ID NO: 5922 - RNA, 37 nt, Artificial Sequence
  Description of Artificial Sequence:  Enzymatic Nucleic acid
ccgaagaggccgaaaggcgagugaggucuucgcuccg

SEQ ID NO: 5923 - RNA, 37 nt, Artificial Sequence
  Description of Artificial Sequence:  Enzymatic Nucleic acid
caucgcuggccgaaaggcgagugaggucuuccccgaa

SEQ ID NO: 5924 - RNA, 37 nt, Artificial Sequence
  Description of Artificial Sequence:  Enzymatic Nucleic acid
ucgcaucggccgaaaggcgagugaggucuugcucccc

SEQ ID NO: 5925 - RNA, 37 nt, Artificial Sequence
  Description of Artificial Sequence:  Enzymatic Nucleic acid
gagggucggccgaaaggcgagugaggucuaucgcugc

SEQ ID NO: 5926 - RNA, 37 nt, Artificial Sequence
  Description of Artificial Sequence:  Enzymatic Nucleic acid
ugccccgggccgaaaggcgagugaggucucgucccgg

SEQ ID NO: 5927 - RNA, 37 nt, Artificial Sequence
  Description of Artificial Sequence:  Enzymatic Nucleic acid
gagcgcuggccgaaaggcgagugaggucucccggccg

SEQ ID NO: 5928 - RNA, 37 nt, Artificial Sequence
  Description of Artificial Sequence:  Enzymatic Nucleic acid
caggagcggccgaaaggcgagugaggucuugccccgg

SEQ ID NO: 5929 - RNA, 37 nt, Artificial Sequence
  Description of Artificial Sequence:  Enzymatic Nucleic acid
gccaggaggccgaaaggcgagugaggucugcugcccc

SEQ ID NO: 5930 - RNA, 37 nt, Artificial Sequence
  Description of Artificial Sequence:  Enzymatic Nucleic acid
cagcagcggccgaaaggcgagugaggucucaggagcg

SEQ ID NO: 5931 - RNA, 37 nt, Artificial Sequence
  Description of Artificial Sequence:  Enzymatic Nucleic acid
gccagcaggccgaaaggcgagugaggucugccaggag

SEQ ID NO: 5932 - RNA, 37 nt, Artificial Sequence
  Description of Artificial Sequence:  Enzymatic Nucleic acid
gcagccaggccgaaaggcgagugaggucuagcgccag

SEQ ID NO: 5933 - RNA, 37 nt, Artificial Sequence
  Description of Artificial Sequence:  Enzymatic Nucleic acid
gagcgcaggccgaaaggcgagugaggucucagcagcg

SEQ ID NO: 5934 - RNA, 37 nt, Artificial Sequence
  Description of Artificial Sequence:  Enzymatic Nucleic acid
gcagagcggccgaaaggcgagugaggucuagccagca

SEQ ID NO: 5935 - RNA, 37 nt, Artificial Sequence
  Description of Artificial Sequence:  Enzymatic Nucleic acid
gggcagaggccgaaaggcgagugaggucugcagccag

SEQ ID NO: 5936 - RNA, 37 nt, Artificial Sequence
  Description of Artificial Sequence:  Enzymatic Nucleic acid
ucgccggggccgaaaggcgagugaggucuagagcgca

SEQ ID NO: 5937 - RNA, 37 nt, Artificial Sequence
  Description of Artificial Sequence:  Enzymatic Nucleic acid
ccgacucggccgaaaggcgagugaggucucgggcaga

SEQ ID NO: 5938 - RNA, 37 nt, Artificial Sequence
  Description of Artificial Sequence:  Enzymatic Nucleic acid
gagcccgagccgaaaggcgagugaggucuucgccggg

SEQ ID NO: 5939 - RNA, 37 nt, Artificial Sequence
  Description of Artificial Sequence:  Enzymatic Nucleic acid
cuccagaggccgaaaggcgagugaggucuccgacucg

SEQ ID NO: 5940 - RNA, 37 nt, Artificial Sequence
  Description of Artificial Sequence:  Enzymatic Nucleic acid
uuggcaaagccgaaaggcgagugaggucuuuucuuuu

SEQ ID NO: 5941 - RNA, 37 nt, Artificial Sequence
  Description of Artificial Sequence:  Enzymatic Nucleic acid
ugccuugggccgaaaggcgagugaggucuaaacuuuc

SEQ ID NO: 5942 - RNA, 37 nt, Artificial Sequence
  Description of Artificial Sequence:  Enzymatic Nucleic acid
uacucguggccgaaaggcgagugaggucucuuggcaa

SEQ ID NO: 5943 - RNA, 37 nt, Artificial Sequence
  Description of Artificial Sequence:  Enzymatic Nucleic acid
gcuuguuagccgaaaggcgagugaggucuucgugccu

SEQ ID NO: 5944 - RNA, 37 nt, Artificial Sequence
  Description of Artificial Sequence:  Enzymatic Nucleic acid
ugcgugaggccgaaaggcgagugaggucuuuguuacu

SEQ ID NO: 5945 - RNA, 37 nt, Artificial Sequence
  Description of Artificial Sequence:  Enzymatic Nucleic acid
cccaacuggccgaaaggcgagugaggucugugagcuu

SEQ ID NO: 5946 - RNA, 37 nt, Artificial Sequence
  Description of Artificial Sequence:  Enzymatic Nucleic acid
gugcccaagccgaaaggcgagugaggucuugcgugag

SEQ ID NO: 5947 - RNA, 37 nt, Artificial Sequence
  Description of Artificial Sequence:  Enzymatic Nucleic acid
caaaaguggccgaaaggcgagugaggucuccaacugc

SEQ ID NO: 5948 - RNA, 37 nt, Artificial Sequence
  Description of Artificial Sequence:  Enzymatic Nucleic acid
ucuggagggccgaaaggcgagugaggucuugagaaaa

SEQ ID NO: 5949 - RNA, 37 nt, Artificial Sequence
  Description of Artificial Sequence:  Enzymatic Nucleic acid
uuauugaagccgaaaggcgagugaggucuauccucug

SEQ ID NO: 5950 - RNA, 37 nt, Artificial Sequence
  Description of Artificial Sequence:  Enzymatic Nucleic acid
ccaccucagccgaaaggcgagugaggucuaguuauug

SEQ ID NO: 5951 - RNA, 37 nt, Artificial Sequence
  Description of Artificial Sequence:  Enzymatic Nucleic acid
aaggaccagccgaaaggcgagugaggucucucacagu

SEQ ID NO: 5952 - RNA, 37 nt, Artificial Sequence
  Description of Artificial Sequence:  Enzymatic Nucleic acid
cccaaggagccgaaaggcgagugaggucucaccucac

SEQ ID NO: 5953 - RNA, 37 nt, Artificial Sequence
  Description of Artificial Sequence:  Enzymatic Nucleic acid
ccucugcagccgaaaggcgagugaggucuauagguaa

SEQ ID NO: 5954 - RNA, 37 nt, Artificial Sequence
  Description of Artificial Sequence:  Enzymatic Nucleic acid
uuccucuggccgaaaggcgagugaggucuacauaggu

SEQ ID NO: 5955 - RNA, 37 nt, Artificial Sequence
  Description of Artificial Sequence:  Enzymatic Nucleic acid
accagccagccgaaaggcgagugaggucucuccugga

SEQ ID NO: 5956 - RNA, 37 nt, Artificial Sequence
  Description of Artificial Sequence:  Enzymatic Nucleic acid
auaaccaggccgaaaggcgagugaggucucaccuccu

SEQ ID NO: 5957 - RNA, 37 nt, Artificial Sequence
  Description of Artificial Sequence:  Enzymatic Nucleic acid
ggacauaagccgaaaggcgagugaggucucagccacc

SEQ ID NO: 5958 - RNA, 37 nt, Artificial Sequence
  Description of Artificial Sequence:  Enzymatic Nucleic acid
aaugaggagccgaaaggcgagugaggucuauaaccag

SEQ ID NO: 5959 - RNA, 37 nt, Artificial Sequence
  Description of Artificial Sequence:  Enzymatic Nucleic acid
guugaggggccgaaaggcgagugaggucuaaugagga

SEQ ID NO: 5960 - RNA, 37 nt, Artificial Sequence
  Description of Artificial Sequence:  Enzymatic Nucleic acid
ucgcuccagccgaaaggcgagugaggucuuguguuga

SEQ ID NO: 5961 - RNA, 37 nt, Artificial Sequence
  Description of Artificial Sequence:  Enzymatic Nucleic acid
ggaauucggccgaaaggcgagugaggucuuccacugu

SEQ ID NO: 5962 - RNA, 37 nt, Artificial Sequence
  Description of Artificial Sequence:  Enzymatic Nucleic acid
augaucuggccgaaaggcgagugaggucuagguuuuc

SEQ ID NO: 5963 - RNA, 37 nt, Artificial Sequence
  Description of Artificial Sequence:  Enzymatic Nucleic acid
ucguaguagccgaaaggcgagugaggucuauauuucc

SEQ ID NO: 5964 - RNA, 37 nt, Artificial Sequence
  Description of Artificial Sequence:  Enzymatic Nucleic acid
ugcuaagggccgaaaggcgagugaggucuauaggaau

SEQ ID NO: 5965 - RNA, 37 nt, Artificial Sequence
  Description of Artificial Sequence:  Enzymatic Nucleic acid
uaagacuggccgaaaggcgagugaggucuuaaggcau

SEQ ID NO: 5966 - RNA, 37 nt, Artificial Sequence
  Description of Artificial Sequence:  Enzymatic Nucleic acid
agauaagagccgaaaggcgagugaggucuugcuaagg

SEQ ID NO: 5967 - RNA, 37 nt, Artificial Sequence
  Description of Artificial Sequence:  Enzymatic Nucleic acid
uuuauuuggccgaaaggcgagugaggucuaucauagu

SEQ ID NO: 5968 - RNA, 37 nt, Artificial Sequence
  Description of Artificial Sequence:  Enzymatic Nucleic acid
augggcaggccgaaaggcgagugaggucuuccuucag

SEQ ID NO: 5969 - RNA, 37 nt, Artificial Sequence
  Description of Artificial Sequence:  Enzymatic Nucleic acid
cucauggggccgaaaggcgagugaggucuagcuccuu

SEQ ID NO: 5970 - RNA, 37 nt, Artificial Sequence
  Description of Artificial Sequence:  Enzymatic Nucleic acid
gcgccauggccgaaaggcgagugaggucuaggauuuc

SEQ ID NO: 5971 - RNA, 37 nt, Artificial Sequence
  Description of Artificial Sequence:  Enzymatic Nucleic acid
gcacggcggccgaaaggcgagugaggucucaugcagg

SEQ ID NO: 5972 - RNA, 37 nt, Artificial Sequence
  Description of Artificial Sequence:  Enzymatic Nucleic acid
ccgcacgggccgaaaggcgagugaggucugccaugca

SEQ ID NO: 5973 - RNA, 37 nt, Artificial Sequence
  Description of Artificial Sequence:  Enzymatic Nucleic acid
gaaccgcagccgaaaggcgagugaggucuggcgccau

SEQ ID NO: 5974 - RNA, 37 nt, Artificial Sequence
  Description of Artificial Sequence:  Enzymatic Nucleic acid
cugaaccggccgaaaggcgagugaggucuacggcgcc

SEQ ID NO: 5975 - RNA, 37 nt, Artificial Sequence
  Description of Artificial Sequence:  Enzymatic Nucleic acid
uugcugaagccgaaaggcgagugaggucucgcacggc

SEQ ID NO: 5976 - RNA, 37 nt, Artificial Sequence
  Description of Artificial Sequence:  Enzymatic Nucleic acid
gguuguuggccgaaaggcgagugaggucuugaaccgc

SEQ ID NO: 5977 - RNA, 37 nt, Artificial Sequence
  Description of Artificial Sequence:  Enzymatic Nucleic acid
gcacaggggccgaaaggcgagugaggucuaggguugu

SEQ ID NO: 5978 - RNA, 37 nt, Artificial Sequence
  Description of Artificial Sequence:  Enzymatic Nucleic acid
acguugcagccgaaaggcgagugaggucuagggcagg

SEQ ID NO: 5979 - RNA, 37 nt, Artificial Sequence
  Description of Artificial Sequence:  Enzymatic Nucleic acid
ccacguuggccgaaaggcgagugaggucuacagggca

SEQ ID NO: 5980 - RNA, 37 nt, Artificial Sequence
  Description of Artificial Sequence:  Enzymatic Nucleic acid
gcucuccagccgaaaggcgagugaggucuguugcaca

SEQ ID NO: 5981 - RNA, 37 nt, Artificial Sequence
  Description of Artificial Sequence:  Enzymatic Nucleic acid
acuggauggccgaaaggcgagugaggucuucuccacg

SEQ ID NO: 5982 - RNA, 37 nt, Artificial Sequence
  Description of Artificial Sequence:  Enzymatic Nucleic acid
ucccgccagccgaaaggcgagugaggucuuggaugcu

SEQ ID NO: 5983 - RNA, 37 nt, Artificial Sequence
  Description of Artificial Sequence:  Enzymatic Nucleic acid
augucccggccgaaaggcgagugaggucucacuggau

SEQ ID NO: 5984 - RNA, 37 nt, Artificial Sequence
  Description of Artificial Sequence:  Enzymatic Nucleic acid
acugcugagccgaaaggcgagugaggucuuauguccc

SEQ ID NO: 5985 - RNA, 37 nt, Artificial Sequence
  Description of Artificial Sequence:  Enzymatic Nucleic acid
agucacuggccgaaaggcgagugaggucuugacuaug

SEQ ID NO: 5986 - RNA, 37 nt, Artificial Sequence
  Description of Artificial Sequence:  Enzymatic Nucleic acid
gaaagucagccgaaaggcgagugaggucuugcugacu

SEQ ID NO: 5987 - RNA, 37 nt, Artificial Sequence
  Description of Artificial Sequence:  Enzymatic Nucleic acid
acauguuggccgaaaggcgagugaggucuugagaaag

SEQ ID NO: 5988 - RNA, 37 nt, Artificial Sequence
  Description of Artificial Sequence:  Enzymatic Nucleic acid
uccaucgagccgaaaggcgagugaggucuauguugcu

SEQ ID NO: 5989 - RNA, 37 nt, Artificial Sequence
  Description of Artificial Sequence:  Enzymatic Nucleic acid
ggcagcuggccgaaaggcgagugaggucuccaggugg

SEQ ID NO: 5990 - RNA, 37 nt, Artificial Sequence
  Description of Artificial Sequence:  Enzymatic Nucleic acid
uuuggcaggccgaaaggcgagugaggucuugcccagg

SEQ ID NO: 5991 - RNA, 37 nt, Artificial Sequence
  Description of Artificial Sequence:  Enzymatic Nucleic acid
acuuuugggccgaaaggcgagugaggucuagcugccc

SEQ ID NO: 5992 - RNA, 37 nt, Artificial Sequence
  Description of Artificial Sequence:  Enzymatic Nucleic acid
ggaucacagccgaaaggcgagugaggucuuuuuggca

SEQ ID NO: 5993 - RNA, 37 nt, Artificial Sequence
  Description of Artificial Sequence:  Enzymatic Nucleic acid
uuggaucagccgaaaggcgagugaggucuacuuuugg

SEQ ID NO: 5994 - RNA, 37 nt, Artificial Sequence
  Description of Artificial Sequence:  Enzymatic Nucleic acid
ugggacaggccgaaaggcgagugaggucuuuggauca

SEQ ID NO: 5995 - RNA, 37 nt, Artificial Sequence
  Description of Artificial Sequence:  Enzymatic Nucleic acid
cauugggagccgaaaggcgagugaggucuagcuugga

SEQ ID NO: 5996 - RNA, 37 nt, Artificial Sequence
  Description of Artificial Sequence:  Enzymatic Nucleic acid
cccagcaggccgaaaggcgagugaggucuucccauug

SEQ ID NO: 5997 - RNA, 37 nt, Artificial Sequence
  Description of Artificial Sequence:  Enzymatic Nucleic acid
caccccaggccgaaaggcgagugaggucuagcuccca

SEQ ID NO: 5998 - RNA, 37 nt, Artificial Sequence
  Description of Artificial Sequence:  Enzymatic Nucleic acid
cuccugcagccgaaaggcgagugaggucucccagcag

SEQ ID NO: 5999 - RNA, 37 nt, Artificial Sequence
  Description of Artificial Sequence:  Enzymatic Nucleic acid
cucuccuggccgaaaggcgagugaggucuaccccagc

SEQ ID NO: 6000 - RNA, 37 nt, Artificial Sequence
  Description of Artificial Sequence:  Enzymatic Nucleic acid
guuucugggccgaaaggcgagugaggucuaguucucc

SEQ ID NO: 6001 - RNA, 37 nt, Artificial Sequence
  Description of Artificial Sequence:  Enzymatic Nucleic acid
gcugggcagccgaaaggcgagugaggucuagaugauu

SEQ ID NO: 6002 - RNA, 37 nt, Artificial Sequence
  Description of Artificial Sequence:  Enzymatic Nucleic acid
cugcuggggccgaaaggcgagugaggucuacagauga

SEQ ID NO: 6003 - RNA, 37 nt, Artificial Sequence
  Description of Artificial Sequence:  Enzymatic Nucleic acid
gagcacuggccgaaaggcgagugaggucuugggcaca

SEQ ID NO: 6004 - RNA, 37 nt, Artificial Sequence
  Description of Artificial Sequence:  Enzymatic Nucleic acid
ccggagcagccgaaaggcgagugaggucuugcugggc

SEQ ID NO: 6005 - RNA, 37 nt, Artificial Sequence
  Description of Artificial Sequence:  Enzymatic Nucleic acid
gcccggaggccgaaaggcgagugaggucuacugcugg

SEQ ID NO: 6006 - RNA, 37 nt, Artificial Sequence
  Description of Artificial Sequence:  Enzymatic Nucleic acid
cggcagcggccgaaaggcgagugaggucuccggagca

SEQ ID NO: 6007 - RNA, 37 nt, Artificial Sequence
  Description of Artificial Sequence:  Enzymatic Nucleic acid
cacggcaggccgaaaggcgagugaggucugcccggag

SEQ ID NO: 6008 - RNA, 37 nt, Artificial Sequence
  Description of Artificial Sequence:  Enzymatic Nucleic acid
ugccacgggccgaaaggcgagugaggucuagcgcccg

SEQ ID NO: 6009 - RNA, 37 nt, Artificial Sequence
  Description of Artificial Sequence:  Enzymatic Nucleic acid
acuugccagccgaaaggcgagugaggucuggcagcgc

SEQ ID NO: 6010 - RNA, 37 nt, Artificial Sequence
  Description of Artificial Sequence:  Enzymatic Nucleic acid
gggacuuggccgaaaggcgagugaggucucacggcag

SEQ ID NO: 6011 - RNA, 37 nt, Artificial Sequence
  Description of Artificial Sequence:  Enzymatic Nucleic acid
cugggggagccgaaaggcgagugaggucuuugccacg

SEQ ID NO: 6012 - RNA, 37 nt, Artificial Sequence
  Description of Artificial Sequence:  Enzymatic Nucleic acid
agcagucagccgaaaggcgagugaggucuugggggac

SEQ ID NO: 6013 - RNA, 37 nt, Artificial Sequence
  Description of Artificial Sequence:  Enzymatic Nucleic acid
uguggcaggccgaaaggcgagugaggucuagucacug

SEQ ID NO: 6014 - RNA, 37 nt, Artificial Sequence
  Description of Artificial Sequence:  Enzymatic Nucleic acid
gguugugggccgaaaggcgagugaggucuagcaguca

SEQ ID NO: 6015 - RNA, 37 nt, Artificial Sequence
  Description of Artificial Sequence:  Enzymatic Nucleic acid
gcagcacagccgaaaggcgagugaggucuugguugug

SEQ ID NO: 6016 - RNA, 37 nt, Artificial Sequence
  Description of Artificial Sequence:  Enzymatic Nucleic acid
cugcagcagccgaaaggcgagugaggucuacugguug

SEQ ID NO: 6017 - RNA, 37 nt, Artificial Sequence
  Description of Artificial Sequence:  Enzymatic Nucleic acid
gccugcaggccgaaaggcgagugaggucuacacuggu

SEQ ID NO: 6018 - RNA, 37 nt, Artificial Sequence
  Description of Artificial Sequence:  Enzymatic Nucleic acid
gcagccuggccgaaaggcgagugaggucuagcacacu

SEQ ID NO: 6019 - RNA, 37 nt, Artificial Sequence
  Description of Artificial Sequence:  Enzymatic Nucleic acid
cugugcaggccgaaaggcgagugaggucucugcagca

SEQ ID NO: 6020 - RNA, 37 nt, Artificial Sequence
  Description of Artificial Sequence:  Enzymatic Nucleic acid
ggccuguggccgaaaggcgagugaggucuagccugca

SEQ ID NO: 6021 - RNA, 37 nt, Artificial Sequence
  Description of Artificial Sequence:  Enzymatic Nucleic acid
cccggggggccgaaaggcgagugaggucucugugcag

SEQ ID NO: 6022 - RNA, 37 nt, Artificial Sequence
  Description of Artificial Sequence:  Enzymatic Nucleic acid
ggcagucggccgaaaggcgagugaggucuucucccgg

SEQ ID NO: 6023 - RNA, 37 nt, Artificial Sequence
  Description of Artificial Sequence:  Enzymatic Nucleic acid
agaccagggccgaaaggcgagugaggucuagucgcuc

SEQ ID NO: 6024 - RNA, 37 nt, Artificial Sequence
  Description of Artificial Sequence:  Enzymatic Nucleic acid
gcggcagagccgaaaggcgagugaggucucaggcagu

SEQ ID NO: 6025 - RNA, 37 nt, Artificial Sequence
  Description of Artificial Sequence:  Enzymatic Nucleic acid
auuugcgggccgaaaggcgagugaggucuagaccagg

SEQ ID NO: 6026 - RNA, 37 nt, Artificial Sequence
  Description of Artificial Sequence:  Enzymatic Nucleic acid
ggaauuuggccgaaaggcgagugaggucuggcagacc

SEQ ID NO: 6027 - RNA, 37 nt, Artificial Sequence
  Description of Artificial Sequence:  Enzymatic Nucleic acid
gcacgugggccgaaaggcgagugaggucuuucgucuc

SEQ ID NO: 6028 - RNA, 37 nt, Artificial Sequence
  Description of Artificial Sequence:  Enzymatic Nucleic acid
uccuugcagccgaaaggcgagugaggucuguggcuuc

SEQ ID NO: 6029 - RNA, 37 nt, Artificial Sequence
  Description of Artificial Sequence:  Enzymatic Nucleic acid
uguccuuggccgaaaggcgagugaggucuacguggcu

SEQ ID NO: 6030 - RNA, 37 nt, Artificial Sequence
  Description of Artificial Sequence:  Enzymatic Nucleic acid
gugggggggccgaaaggcgagugaggucuaggugucc

SEQ ID NO: 6031 - RNA, 37 nt, Artificial Sequence
  Description of Artificial Sequence:  Enzymatic Nucleic acid
uuguagaggccgaaaggcgagugaggucuaugagugg

SEQ ID NO: 6032 - RNA, 37 nt, Artificial Sequence
  Description of Artificial Sequence:  Enzymatic Nucleic acid
aucugguagccgaaaggcgagugaggucugugguggg

SEQ ID NO: 6033 - RNA, 37 nt, Artificial Sequence
  Description of Artificial Sequence:  Enzymatic Nucleic acid
gggguucagccgaaaggcgagugaggucuauccaucu

SEQ ID NO: 6034 - RNA, 37 nt, Artificial Sequence
  Description of Artificial Sequence:  Enzymatic Nucleic acid
uguauuuggccgaaaggcgagugaggucuccucgggg

SEQ ID NO: 6035 - RNA, 37 nt, Artificial Sequence
  Description of Artificial Sequence:  Enzymatic Nucleic acid
caccaaaggccgaaaggcgagugaggucuuguauuug

SEQ ID NO: 6036 - RNA, 37 nt, Artificial Sequence
  Description of Artificial Sequence:  Enzymatic Nucleic acid
agguggcagccgaaaggcgagugaggucucaaagcug

SEQ ID NO: 6037 - RNA, 37 nt, Artificial Sequence
  Description of Artificial Sequence:  Enzymatic Nucleic acid
gcaggugggccgaaaggcgagugaggucuaccaaagc

SEQ ID NO: 6038 - RNA, 37 nt, Artificial Sequence
  Description of Artificial Sequence:  Enzymatic Nucleic acid
ucuucacggccgaaaggcgagugaggucuagguggca

SEQ ID NO: 6039 - RNA, 37 nt, Artificial Sequence
  Description of Artificial Sequence:  Enzymatic Nucleic acid
cuucuucagccgaaaggcgagugaggucugcaggugg

SEQ ID NO: 6040 - RNA, 37 nt, Artificial Sequence
  Description of Artificial Sequence:  Enzymatic Nucleic acid
cggggacagccgaaaggcgagugaggucuuucuucac

SEQ ID NO: 6041 - RNA, 37 nt, Artificial Sequence
  Description of Artificial Sequence:  Enzymatic Nucleic acid
uacggggagccgaaaggcgagugaggucuacuucuuc

SEQ ID NO: 6042 - RNA, 37 nt, Artificial Sequence
  Description of Artificial Sequence:  Enzymatic Nucleic acid
cauaauuagccgaaaggcgagugaggucuggggacac

SEQ ID NO: 6043 - RNA, 37 nt, Artificial Sequence
  Description of Artificial Sequence:  Enzymatic Nucleic acid
ugucaccagccgaaaggcgagugaggucuauaauuac

SEQ ID NO: 6044 - RNA, 37 nt, Artificial Sequence
  Description of Artificial Sequence:  Enzymatic Nucleic acid
aucugucagccgaaaggcgagugaggucucacauaau

SEQ ID NO: 6045 - RNA, 37 nt, Artificial Sequence
  Description of Artificial Sequence:  Enzymatic Nucleic acid
cgcacgaggccgaaaggcgagugaggucucgugaucu

SEQ ID NO: 6046 - RNA, 37 nt, Artificial Sequence
  Description of Artificial Sequence:  Enzymatic Nucleic acid
cggacgcagccgaaaggcgagugaggucugagccgug

SEQ ID NO: 6047 - RNA, 37 nt, Artificial Sequence
  Description of Artificial Sequence:  Enzymatic Nucleic acid
cucggacggccgaaaggcgagugaggucuacgagccg

SEQ ID NO: 6048 - RNA, 37 nt, Artificial Sequence
  Description of Artificial Sequence:  Enzymatic Nucleic acid
ggcucggagccgaaaggcgagugaggucugcacgagc

SEQ ID NO: 6049 - RNA, 37 nt, Artificial Sequence
  Description of Artificial Sequence:  Enzymatic Nucleic acid
cccacagggccgaaaggcgagugaggucuucggacgc

SEQ ID NO: 6050 - RNA, 37 nt, Artificial Sequence
  Description of Artificial Sequence:  Enzymatic Nucleic acid
cggccccagccgaaaggcgagugaggucuaggcucgg

SEQ ID NO: 6051 - RNA, 37 nt, Artificial Sequence
  Description of Artificial Sequence:  Enzymatic Nucleic acid
gcugucgggccgaaaggcgagugaggucucccacagg

SEQ ID NO: 6052 - RNA, 37 nt, Artificial Sequence
  Description of Artificial Sequence:  Enzymatic Nucleic acid
ucucauaggccgaaaggcgagugaggucuugucggcc

SEQ ID NO: 6053 - RNA, 37 nt, Artificial Sequence
  Description of Artificial Sequence:  Enzymatic Nucleic acid
ugcggacggccgaaaggcgagugaggucucgucuucc

SEQ ID NO: 6054 - RNA, 37 nt, Artificial Sequence
  Description of Artificial Sequence:  Enzymatic Nucleic acid
cuugcggagccgaaaggcgagugaggucugccgucuu

SEQ ID NO: 6055 - RNA, 37 nt, Artificial Sequence
  Description of Artificial Sequence:  Enzymatic Nucleic acid
uacacuuggccgaaaggcgagugaggucuggacgccg

SEQ ID NO: 6056 - RNA, 37 nt, Artificial Sequence
  Description of Artificial Sequence:  Enzymatic Nucleic acid
uucuuacagccgaaaggcgagugaggucuuugcggac

SEQ ID NO: 6057 - RNA, 37 nt, Artificial Sequence
  Description of Artificial Sequence:  Enzymatic Nucleic acid
acuucuuagccgaaaggcgagugaggucuacuugcgg

SEQ ID NO: 6058 - RNA, 37 nt, Artificial Sequence
  Description of Artificial Sequence:  Enzymatic Nucleic acid
ccuucgcagccgaaaggcgagugaggucuuucuuaca

SEQ ID NO: 6059 - RNA, 37 nt, Artificial Sequence
  Description of Artificial Sequence:  Enzymatic Nucleic acid
gcccuucggccgaaaggcgagugaggucuacuucuua

SEQ ID NO: 6060 - RNA, 37 nt, Artificial Sequence
  Description of Artificial Sequence:  Enzymatic Nucleic acid
cggcaagggccgaaaggcgagugaggucuccuucgca

SEQ ID NO: 6061 - RNA, 37 nt, Artificial Sequence
  Description of Artificial Sequence:  Enzymatic Nucleic acid
cuuugcgggccgaaaggcgagugaggucuaaggcccu

SEQ ID NO: 6062 - RNA, 37 nt, Artificial Sequence
  Description of Artificial Sequence:  Enzymatic Nucleic acid
acacuuuggccgaaaggcgagugaggucuggcaaggc

SEQ ID NO: 6063 - RNA, 37 nt, Artificial Sequence
  Description of Artificial Sequence:  Enzymatic Nucleic acid
guuacacagccgaaaggcgagugaggucuuuugcggc

SEQ ID NO: 6064 - RNA, 37 nt, Artificial Sequence
  Description of Artificial Sequence:  Enzymatic Nucleic acid
ccguuacagccgaaaggcgagugaggucuacuuugcg

SEQ ID NO: 6065 - RNA, 37 nt, Artificial Sequence
  Description of Artificial Sequence:  Enzymatic Nucleic acid
uuccguuagccgaaaggcgagugaggucuacacuuug

SEQ ID NO: 6066 - RNA, 37 nt, Artificial Sequence
  Description of Artificial Sequence:  Enzymatic Nucleic acid
caccaauagccgaaaggcgagugaggucucuauuccg

SEQ ID NO: 6067 - RNA, 37 nt, Artificial Sequence
  Description of Artificial Sequence:  Enzymatic Nucleic acid
uaaauucagccgaaaggcgagugaggucucaauaccu

SEQ ID NO: 6068 - RNA, 37 nt, Artificial Sequence
  Description of Artificial Sequence:  Enzymatic Nucleic acid
auucguaggccgaaaggcgagugaggucuauuuaugg

SEQ ID NO: 6069 - RNA, 37 nt, Artificial Sequence
  Description of Artificial Sequence:  Enzymatic Nucleic acid
uggagguggccgaaaggcgagugaggucuaguuuuug

SEQ ID NO: 6070 - RNA, 37 nt, Artificial Sequence
  Description of Artificial Sequence:  Enzymatic Nucleic acid
gaucgccagccgaaaggcgagugaggucuugauggag

SEQ ID NO: 6071 - RNA, 37 nt, Artificial Sequence
  Description of Artificial Sequence:  Enzymatic Nucleic acid
ggagaucggccgaaaggcgagugaggucucacugaug

SEQ ID NO: 6072 - RNA, 37 nt, Artificial Sequence
  Description of Artificial Sequence:  Enzymatic Nucleic acid
gccaccgggccgaaaggcgagugaggucuaggaugug

SEQ ID NO: 6073 - RNA, 37 nt, Artificial Sequence
  Description of Artificial Sequence:  Enzymatic Nucleic acid
aaaugccagccgaaaggcgagugaggucucggcagga

SEQ ID NO: 6074 - RNA, 37 nt, Artificial Sequence
  Description of Artificial Sequence:  Enzymatic Nucleic acid
ccuaaauggccgaaaggcgagugaggucucaccggca

SEQ ID NO: 6075 - RNA, 37 nt, Artificial Sequence
  Description of Artificial Sequence:  Enzymatic Nucleic acid
aggagucagccgaaaggcgagugaggucucccuaaau

SEQ ID NO: 6076 - RNA, 37 nt, Artificial Sequence
  Description of Artificial Sequence:  Enzymatic Nucleic acid
uuccuuuagccgaaaggcgagugaggucugguuuuca

SEQ ID NO: 6077 - RNA, 37 nt, Artificial Sequence
  Description of Artificial Sequence:  Enzymatic Nucleic acid
agcaaaaagccgaaaggcgagugaggucuccugugau

SEQ ID NO: 6078 - RNA, 37 nt, Artificial Sequence
  Description of Artificial Sequence:  Enzymatic Nucleic acid
ugaaucaggccgaaaggcgagugaggucuaaaaaccc

SEQ ID NO: 6079 - RNA, 37 nt, Artificial Sequence
  Description of Artificial Sequence:  Enzymatic Nucleic acid
aggccaaggccgaaaggcgagugaggucucugaauca

SEQ ID NO: 6080 - RNA, 37 nt, Artificial Sequence
  Description of Artificial Sequence:  Enzymatic Nucleic acid
uuuucagggccgaaaggcgagugaggucucaagccug

SEQ ID NO: 6081 - RNA, 37 nt, Artificial Sequence
  Description of Artificial Sequence:  Enzymatic Nucleic acid
cucaaagggccgaaaggcgagugaggucuauggaggu

SEQ ID NO: 6082 - RNA, 37 nt, Artificial Sequence
  Description of Artificial Sequence:  Enzymatic Nucleic acid
uccugccggccgaaaggcgagugaggucuguaugauu

SEQ ID NO: 6083 - RNA, 37 nt, Artificial Sequence
  Description of Artificial Sequence:  Enzymatic Nucleic acid
ugguccuggccgaaaggcgagugaggucucgcguaug

SEQ ID NO: 6084 - RNA, 37 nt, Artificial Sequence
  Description of Artificial Sequence:  Enzymatic Nucleic acid
ccauguuggccgaaaggcgagugaggucuuugguccu

SEQ ID NO: 6085 - RNA, 37 nt, Artificial Sequence
  Description of Artificial Sequence:  Enzymatic Nucleic acid
aaaacugagccgaaaggcgagugaggucucauguugc

SEQ ID NO: 6086 - RNA, 37 nt, Artificial Sequence
  Description of Artificial Sequence:  Enzymatic Nucleic acid
agagaaaagccgaaaggcgagugaggucuugaccaug

SEQ ID NO: 6087 - RNA, 37 nt, Artificial Sequence
  Description of Artificial Sequence:  Enzymatic Nucleic acid
gacgacuggccgaaaggcgagugaggucuaagagaaa

SEQ ID NO: 6088 - RNA, 37 nt, Artificial Sequence
  Description of Artificial Sequence:  Enzymatic Nucleic acid
gcugacgagccgaaaggcgagugaggucuugcaagag

SEQ ID NO: 6089 - RNA, 37 nt, Artificial Sequence
  Description of Artificial Sequence:  Enzymatic Nucleic acid
caggcugagccgaaaggcgagugaggucugacugcaa

SEQ ID NO: 6090 - RNA, 37 nt, Artificial Sequence
  Description of Artificial Sequence:  Enzymatic Nucleic acid
uguucagggccgaaaggcgagugaggucuugacgacu

SEQ ID NO: 6091 - RNA, 37 nt, Artificial Sequence
  Description of Artificial Sequence:  Enzymatic Nucleic acid
ugagggaggccgaaaggcgagugaggucuguaauccc

SEQ ID NO: 6092 - RNA, 37 nt, Artificial Sequence
  Description of Artificial Sequence:  Enzymatic Nucleic acid
cuccaucagccgaaaggcgagugaggucuuuaucucc

SEQ ID NO: 6093 - RNA, 37 nt, Artificial Sequence
  Description of Artificial Sequence:  Enzymatic Nucleic acid
aauuaucagccgaaaggcgagugaggucuaucuccau

SEQ ID NO: 6094 - RNA, 37 nt, Artificial Sequence
  Description of Artificial Sequence:  Enzymatic Nucleic acid
gcauagcagccgaaaggcgagugaggucuaaauuuuu

SEQ ID NO: 6095 - RNA, 37 nt, Artificial Sequence
  Description of Artificial Sequence:  Enzymatic Nucleic acid
uugcauaggccgaaaggcgagugaggucuacaaauuu

SEQ ID NO: 6096 - RNA, 37 nt, Artificial Sequence
  Description of Artificial Sequence:  Enzymatic Nucleic acid
uguauuuggccgaaaggcgagugaggucuauagcaca

SEQ ID NO: 6097 - RNA, 37 nt, Artificial Sequence
  Description of Artificial Sequence:  Enzymatic Nucleic acid
gucccaaagccgaaaggcgagugaggucuaguuuuuu

SEQ ID NO: 6098 - RNA, 37 nt, Artificial Sequence
  Description of Artificial Sequence:  Enzymatic Nucleic acid
uuuucugagccgaaaggcgagugaggucucggagguc

SEQ ID NO: 6099 - RNA, 37 nt, Artificial Sequence
  Description of Artificial Sequence:  Enzymatic Nucleic acid
cucuguuggccgaaaggcgagugaggucuuuauaauu

SEQ ID NO: 6100 - RNA, 37 nt, Artificial Sequence
  Description of Artificial Sequence:  Enzymatic Nucleic acid
uguuuucagccgaaaggcgagugaggucucucuguug

SEQ ID NO: 6101 - RNA, 37 nt, Artificial Sequence
  Description of Artificial Sequence:  Enzymatic Nucleic acid
ccuugcaggccgaaaggcgagugaggucuuguuuuca

SEQ ID NO: 6102 - RNA, 37 nt, Artificial Sequence
  Description of Artificial Sequence:  Enzymatic Nucleic acid
uggccuuggccgaaaggcgagugaggucuagcuguuu

SEQ ID NO: 6103 - RNA, 37 nt, Artificial Sequence
  Description of Artificial Sequence:  Enzymatic Nucleic acid
gccugugggccgaaaggcgagugaggucucuugcagc

SEQ ID NO: 6104 - RNA, 37 nt, Artificial Sequence
  Description of Artificial Sequence:  Enzymatic Nucleic acid
agaccugggccgaaaggcgagugaggucucuguggcc

SEQ ID NO: 6105 - RNA, 37 nt, Artificial Sequence
  Description of Artificial Sequence:  Enzymatic Nucleic acid
auggcagagccgaaaggcgagugaggucucuggccug

SEQ ID NO: 6106 - RNA, 37 nt, Artificial Sequence
  Description of Artificial Sequence:  Enzymatic Nucleic acid
aggcaugggccgaaaggcgagugaggucuagaccugg

SEQ ID NO: 6107 - RNA, 37 nt, Artificial Sequence
  Description of Artificial Sequence:  Enzymatic Nucleic acid
gcacaagggccgaaaggcgagugaggucuauggcaga

SEQ ID NO: 6108 - RNA, 37 nt, Artificial Sequence
  Description of Artificial Sequence:  Enzymatic Nucleic acid
ggggagcagccgaaaggcgagugaggucuaaggcaug

SEQ ID NO: 6109 - RNA, 37 nt, Artificial Sequence
  Description of Artificial Sequence:  Enzymatic Nucleic acid
cgggggaggccgaaaggcgagugaggucuacaaggca

SEQ ID NO: 6110 - RNA, 37 nt, Artificial Sequence
  Description of Artificial Sequence:  Enzymatic Nucleic acid
cccagcaggccgaaaggcgagugaggucuccucgggg

SEQ ID NO: 6111 - RNA, 37 nt, Artificial Sequence
  Description of Artificial Sequence:  Enzymatic Nucleic acid
ggccccaggccgaaaggcgagugaggucuagcccucg

SEQ ID NO: 6112 - RNA, 37 nt, Artificial Sequence
  Description of Artificial Sequence:  Enzymatic Nucleic acid
gcuccggggccgaaaggcgagugaggucucccagcag

SEQ ID NO: 6113 - RNA, 37 nt, Artificial Sequence
  Description of Artificial Sequence:  Enzymatic Nucleic acid
ucccuggggccgaaaggcgagugaggucuuccgggcc

SEQ ID NO: 6114 - RNA, 37 nt, Artificial Sequence
  Description of Artificial Sequence:  Enzymatic Nucleic acid
aagagacggccgaaaggcgagugaggucuagucccug

SEQ ID NO: 6115 - RNA, 37 nt, Artificial Sequence
  Description of Artificial Sequence:  Enzymatic Nucleic acid
gcaagagagccgaaaggcgagugaggucugcaguccc

SEQ ID NO: 6116 - RNA, 37 nt, Artificial Sequence
  Description of Artificial Sequence:  Enzymatic Nucleic acid
cauuccgggccgaaaggcgagugaggucuaagagacg

SEQ ID NO: 6117 - RNA, 37 nt, Artificial Sequence
  Description of Artificial Sequence:  Enzymatic Nucleic acid
ucggcugagccgaaaggcgagugaggucuauuccggc

SEQ ID NO: 6118 - RNA, 37 nt, Artificial Sequence
  Description of Artificial Sequence:  Enzymatic Nucleic acid
ugccucgggccgaaaggcgagugaggucuugacauuc

SEQ ID NO: 6119 - RNA, 37 nt, Artificial Sequence
  Description of Artificial Sequence:  Enzymatic Nucleic acid
auucccuggccgaaaggcgagugaggucucucggcug

SEQ ID NO: 6120 - RNA, 37 nt, Artificial Sequence
  Description of Artificial Sequence:  Enzymatic Nucleic acid
uguccacggccgaaaggcgagugaggucuauucccug

SEQ ID NO: 6121 - RNA, 37 nt, Artificial Sequence
  Description of Artificial Sequence:  Enzymatic Nucleic acid
cuuguccagccgaaaggcgagugaggucugcauuccc

SEQ ID NO: 6122 - RNA, 37 nt, Artificial Sequence
  Description of Artificial Sequence:  Enzymatic Nucleic acid
agcuugcagccgaaaggcgagugaggucuuuguccac

SEQ ID NO: 6123 - RNA, 37 nt, Artificial Sequence
  Description of Artificial Sequence:  Enzymatic Nucleic acid
gaagcuuggccgaaaggcgagugaggucuacuugucc

SEQ ID NO: 6124 - RNA, 37 nt, Artificial Sequence
  Description of Artificial Sequence:  Enzymatic Nucleic acid
uccagaaggccgaaaggcgagugaggucuuugcacuu

SEQ ID NO: 6125 - RNA, 37 nt, Artificial Sequence
  Description of Artificial Sequence:  Enzymatic Nucleic acid
uuggcucagccgaaaggcgagugaggucuccuccaga

SEQ ID NO: 6126 - RNA, 37 nt, Artificial Sequence
  Description of Artificial Sequence:  Enzymatic Nucleic acid
ucccuugggccgaaaggcgagugaggucuucacccuc

SEQ ID NO: 6127 - RNA, 37 nt, Artificial Sequence
  Description of Artificial Sequence:  Enzymatic Nucleic acid
uccacaaagccgaaaggcgagugaggucuucccuugg

SEQ ID NO: 6128 - RNA, 37 nt, Artificial Sequence
  Description of Artificial Sequence:  Enzymatic Nucleic acid
guucuccagccgaaaggcgagugaggucuaaacuccc

SEQ ID NO: 6129 - RNA, 37 nt, Artificial Sequence
  Description of Artificial Sequence:  Enzymatic Nucleic acid
uguaugcagccgaaaggcgagugaggucuucagaguu

SEQ ID NO: 6130 - RNA, 37 nt, Artificial Sequence
  Description of Artificial Sequence:  Enzymatic Nucleic acid
acuguauggccgaaaggcgagugaggucuacucagag

SEQ ID NO: 6131 - RNA, 37 nt, Artificial Sequence
  Description of Artificial Sequence:  Enzymatic Nucleic acid
ggguggcagccgaaaggcgagugaggucuuguaugca

SEQ ID NO: 6132 - RNA, 37 nt, Artificial Sequence
  Description of Artificial Sequence:  Enzymatic Nucleic acid
cugggugggccgaaaggcgagugaggucuacuguaug

SEQ ID NO: 6133 - RNA, 37 nt, Artificial Sequence
  Description of Artificial Sequence:  Enzymatic Nucleic acid
ggcaggcagccgaaaggcgagugaggucuucugggug

SEQ ID NO: 6134 - RNA, 37 nt, Artificial Sequence
  Description of Artificial Sequence:  Enzymatic Nucleic acid
gaggcagggccgaaaggcgagugaggucuacucuggg

SEQ ID NO: 6135 - RNA, 37 nt, Artificial Sequence
  Description of Artificial Sequence:  Enzymatic Nucleic acid
gccugagggccgaaaggcgagugaggucuaggcacuc

SEQ ID NO: 6136 - RNA, 37 nt, Artificial Sequence
  Description of Artificial Sequence:  Enzymatic Nucleic acid
guucaugggccgaaaggcgagugaggucucugaggca

SEQ ID NO: 6137 - RNA, 37 nt, Artificial Sequence
  Description of Artificial Sequence:  Enzymatic Nucleic acid
guccuguggccgaaaggcgagugaggucuaggugaug

SEQ ID NO: 6138 - RNA, 37 nt, Artificial Sequence
  Description of Artificial Sequence:  Enzymatic Nucleic acid
acuggauagccgaaaggcgagugaggucuaguugucu

SEQ ID NO: 6139 - RNA, 37 nt, Artificial Sequence
  Description of Artificial Sequence:  Enzymatic Nucleic acid
ugggcacagccgaaaggcgagugaggucuuggauaca

SEQ ID NO: 6140 - RNA, 37 nt, Artificial Sequence
  Description of Artificial Sequence:  Enzymatic Nucleic acid
agugggcagccgaaaggcgagugaggucuacuggaua

SEQ ID NO: 6141 - RNA, 37 nt, Artificial Sequence
  Description of Artificial Sequence:  Enzymatic Nucleic acid
guaguggggccgaaaggcgagugaggucuacacugga

SEQ ID NO: 6142 - RNA, 37 nt, Artificial Sequence
  Description of Artificial Sequence:  Enzymatic Nucleic acid
aguggggggccgaaaggcgagugaggucucgucaaug

SEQ ID NO: 6143 - RNA, 37 nt, Artificial Sequence
  Description of Artificial Sequence:  Enzymatic Nucleic acid
ucuugacggccgaaaggcgagugaggucuaguggggg

SEQ ID NO: 6144 - RNA, 37 nt, Artificial Sequence
  Description of Artificial Sequence:  Enzymatic Nucleic acid
ggucuugagccgaaaggcgagugaggucugcaguggg

SEQ ID NO: 6145 - RNA, 37 nt, Artificial Sequence
  Description of Artificial Sequence:  Enzymatic Nucleic acid
cugccggggccgaaaggcgagugaggucuaggucuug

SEQ ID NO: 6146 - RNA, 37 nt, Artificial Sequence
  Description of Artificial Sequence:  Enzymatic Nucleic acid
gacuccuggccgaaaggcgagugaggucucgggcagg

SEQ ID NO: 6147 - RNA, 37 nt, Artificial Sequence
  Description of Artificial Sequence:  Enzymatic Nucleic acid
ucccaugagccgaaaggcgagugaggucuuccugccg

SEQ ID NO: 6148 - RNA, 37 nt, Artificial Sequence
  Description of Artificial Sequence:  Enzymatic Nucleic acid
cuuccagagccgaaaggcgagugaggucucagggugu

SEQ ID NO: 6149 - RNA, 37 nt, Artificial Sequence
  Description of Artificial Sequence:  Enzymatic Nucleic acid
ucugcguagccgaaaggcgagugaggucuuuccagac

SEQ ID NO: 6150 - RNA, 37 nt, Artificial Sequence
  Description of Artificial Sequence:  Enzymatic Nucleic acid
ggcgucuggccgaaaggcgagugaggucuguacuucc

SEQ ID NO: 6151 - RNA, 37 nt, Artificial Sequence
  Description of Artificial Sequence:  Enzymatic Nucleic acid
auggccgggccgaaaggcgagugaggucugucugcgu

SEQ ID NO: 6152 - RNA, 37 nt, Artificial Sequence
  Description of Artificial Sequence:  Enzymatic Nucleic acid
acacaugggccgaaaggcgagugaggucucggcgucu

SEQ ID NO: 6153 - RNA, 37 nt, Artificial Sequence
  Description of Artificial Sequence:  Enzymatic Nucleic acid
guggcacagccgaaaggcgagugaggucuauggccgg

SEQ ID NO: 6154 - RNA, 37 nt, Artificial Sequence
  Description of Artificial Sequence:  Enzymatic Nucleic acid
agguggcagccgaaaggcgagugaggucuacauggcc

SEQ ID NO: 6155 - RNA, 37 nt, Artificial Sequence
  Description of Artificial Sequence:  Enzymatic Nucleic acid
acaggugggccgaaaggcgagugaggucuacacaugg

SEQ ID NO: 6156 - RNA, 37 nt, Artificial Sequence
  Description of Artificial Sequence:  Enzymatic Nucleic acid
ggauggcagccgaaaggcgagugaggucuagguggca

SEQ ID NO: 6157 - RNA, 37 nt, Artificial Sequence
  Description of Artificial Sequence:  Enzymatic Nucleic acid
uuggaugggccgaaaggcgagugaggucuacaggugg

SEQ ID NO: 6158 - RNA, 37 nt, Artificial Sequence
  Description of Artificial Sequence:  Enzymatic Nucleic acid
cguagguggccgaaaggcgagugaggucuaguuugga

SEQ ID NO: 6159 - RNA, 37 nt, Artificial Sequence
  Description of Artificial Sequence:  Enzymatic Nucleic acid
gcccaguggccgaaaggcgagugaggucuauccguag

SEQ ID NO: 6160 - RNA, 37 nt, Artificial Sequence
  Description of Artificial Sequence:  Enzymatic Nucleic acid
agaccugggccgaaaggcgagugaggucuccagugca

SEQ ID NO: 6161 - RNA, 37 nt, Artificial Sequence
  Description of Artificial Sequence:  Enzymatic Nucleic acid
cuucaagagccgaaaggcgagugaggucucuggccca

SEQ ID NO: 6162 - RNA, 37 nt, Artificial Sequence
  Description of Artificial Sequence:  Enzymatic Nucleic acid
uuggacaggccgaaaggcgagugaggucucuucaaga

SEQ ID NO: 6163 - RNA, 37 nt, Artificial Sequence
  Description of Artificial Sequence:  Enzymatic Nucleic acid
ucguuggagccgaaaggcgagugaggucuagccuuca

SEQ ID NO: 6164 - RNA, 37 nt, Artificial Sequence
  Description of Artificial Sequence:  Enzymatic Nucleic acid
aucuuagggccgaaaggcgagugaggucuccauucgu

SEQ ID NO: 6165 - RNA, 37 nt, Artificial Sequence
  Description of Artificial Sequence:  Enzymatic Nucleic acid
gcgauggagccgaaaggcgagugaggucugggaucuu

SEQ ID NO: 6166 - RNA, 37 nt, Artificial Sequence
  Description of Artificial Sequence:  Enzymatic Nucleic acid
cccagugggccgaaaggcgagugaggucugauggacg

SEQ ID NO: 6167 - RNA, 37 nt, Artificial Sequence
  Description of Artificial Sequence:  Enzymatic Nucleic acid
ggcccccagccgaaaggcgagugaggucucaucccag

SEQ ID NO: 6168 - RNA, 37 nt, Artificial Sequence
  Description of Artificial Sequence:  Enzymatic Nucleic acid
gaggaggggccgaaaggcgagugaggucuccccacca

SEQ ID NO: 6169 - RNA, 37 nt, Artificial Sequence
  Description of Artificial Sequence:  Enzymatic Nucleic acid
accagcaggccgaaaggcgagugaggucuaagaggag

SEQ ID NO: 6170 - RNA, 37 nt, Artificial Sequence
  Description of Artificial Sequence:  Enzymatic Nucleic acid
accaccaggccgaaaggcgagugaggucuagcaagag

SEQ ID NO: 6171 - RNA, 37 nt, Artificial Sequence
  Description of Artificial Sequence:  Enzymatic Nucleic acid
ggccaccagccgaaaggcgagugaggucucagcagca

SEQ ID NO: 6172 - RNA, 37 nt, Artificial Sequence
  Description of Artificial Sequence:  Enzymatic Nucleic acid
cagggccagccgaaaggcgagugaggucucaccagca

SEQ ID NO: 6173 - RNA, 37 nt, Artificial Sequence
  Description of Artificial Sequence:  Enzymatic Nucleic acid
ccccaggggccgaaaggcgagugaggucucaccacca

SEQ ID NO: 6174 - RNA, 37 nt, Artificial Sequence
  Description of Artificial Sequence:  Enzymatic Nucleic acid
ugaagagggccgaaaggcgagugaggucucgaucccc

SEQ ID NO: 6175 - RNA, 37 nt, Artificial Sequence
  Description of Artificial Sequence:  Enzymatic Nucleic acid
cgccuucggccgaaaggcgagugaggucuaugaagag

SEQ ID NO: 6176 - RNA, 37 nt, Artificial Sequence
  Description of Artificial Sequence:  Enzymatic Nucleic acid
auguggcggccgaaaggcgagugaggucucuucgcau

SEQ ID NO: 6177 - RNA, 37 nt, Artificial Sequence
  Description of Artificial Sequence:  Enzymatic Nucleic acid
cgaugugggccgaaaggcgagugaggucugccuucgc

SEQ ID NO: 6178 - RNA, 37 nt, Artificial Sequence
  Description of Artificial Sequence:  Enzymatic Nucleic acid
cuuccgaagccgaaaggcgagugaggucugauguggc

SEQ ID NO: 6179 - RNA, 37 nt, Artificial Sequence
  Description of Artificial Sequence:  Enzymatic Nucleic acid
agcgugcggccgaaaggcgagugaggucuuuccgaac

SEQ ID NO: 6180 - RNA, 37 nt, Artificial Sequence
  Description of Artificial Sequence:  Enzymatic Nucleic acid
gcagcguggccgaaaggcgagugaggucugcuuccga

SEQ ID NO: 6181 - RNA, 37 nt, Artificial Sequence
  Description of Artificial Sequence:  Enzymatic Nucleic acid
cuccgcaggccgaaaggcgagugaggucugugcgcuu

SEQ ID NO: 6182 - RNA, 37 nt, Artificial Sequence
  Description of Artificial Sequence:  Enzymatic Nucleic acid
agccuccggccgaaaggcgagugaggucuagcgugcg

SEQ ID NO: 6183 - RNA, 37 nt, Artificial Sequence
  Description of Artificial Sequence:  Enzymatic Nucleic acid
ugcagcaggccgaaaggcgagugaggucucuccgcag

SEQ ID NO: 6184 - RNA, 37 nt, Artificial Sequence
  Description of Artificial Sequence:  Enzymatic Nucleic acid
uccugcaggccgaaaggcgagugaggucuagccuccg

SEQ ID NO: 6185 - RNA, 37 nt, Artificial Sequence
  Description of Artificial Sequence:  Enzymatic Nucleic acid
cucuccuggccgaaaggcgagugaggucuagcagccu

SEQ ID NO: 6186 - RNA, 37 nt, Artificial Sequence
  Description of Artificial Sequence:  Enzymatic Nucleic acid
uccacaaggccgaaaggcgagugaggucuucccucuc

SEQ ID NO: 6187 - RNA, 37 nt, Artificial Sequence
  Description of Artificial Sequence:  Enzymatic Nucleic acid
aggcuccagccgaaaggcgagugaggucuaagcuccc

SEQ ID NO: 6188 - RNA, 37 nt, Artificial Sequence
  Description of Artificial Sequence:  Enzymatic Nucleic acid
guaagagggccgaaaggcgagugaggucuuccacaag

SEQ ID NO: 6189 - RNA, 37 nt, Artificial Sequence
  Description of Artificial Sequence:  Enzymatic Nucleic acid
cuucuccagccgaaaggcgagugaggucuugggugua

SEQ ID NO: 6190 - RNA, 37 nt, Artificial Sequence
  Description of Artificial Sequence:  Enzymatic Nucleic acid
guugggaggccgaaaggcgagugaggucuuucuccac

SEQ ID NO: 6191 - RNA, 37 nt, Artificial Sequence
  Description of Artificial Sequence:  Enzymatic Nucleic acid
caagagaggccgaaaggcgagugaggucuuugguugg

SEQ ID NO: 6192 - RNA, 37 nt, Artificial Sequence
  Description of Artificial Sequence:  Enzymatic Nucleic acid
gcccagcagccgaaaggcgagugaggucuuuugaucu

SEQ ID NO: 6193 - RNA, 37 nt, Artificial Sequence
  Description of Artificial Sequence:  Enzymatic Nucleic acid
gagcccaggccgaaaggcgagugaggucuacuuugau

SEQ ID NO: 6194 - RNA, 37 nt, Artificial Sequence
  Description of Artificial Sequence:  Enzymatic Nucleic acid
caccggaggccgaaaggcgagugaggucuccagcacu

SEQ ID NO: 6195 - RNA, 37 nt, Artificial Sequence
  Description of Artificial Sequence:  Enzymatic Nucleic acid
cgaacgcagccgaaaggcgagugaggucucggagccc

SEQ ID NO: 6196 - RNA, 37 nt, Artificial Sequence
  Description of Artificial Sequence:  Enzymatic Nucleic acid
gccgaacggccgaaaggcgagugaggucuaccggagc

SEQ ID NO: 6197 - RNA, 37 nt, Artificial Sequence
  Description of Artificial Sequence:  Enzymatic Nucleic acid
gugccgaagccgaaaggcgagugaggucugcaccgga

SEQ ID NO: 6198 - RNA, 37 nt, Artificial Sequence
  Description of Artificial Sequence:  Enzymatic Nucleic acid
acaccguggccgaaaggcgagugaggucucgaacgca

SEQ ID NO: 6199 - RNA, 37 nt, Artificial Sequence
  Description of Artificial Sequence:  Enzymatic Nucleic acid
cuuauacagccgaaaggcgagugaggucucgugccga

SEQ ID NO: 6200 - RNA, 37 nt, Artificial Sequence
  Description of Artificial Sequence:  Enzymatic Nucleic acid
cccuuauagccgaaaggcgagugaggucuaccgugcc

SEQ ID NO: 6201 - RNA, 37 nt, Artificial Sequence
  Description of Artificial Sequence:  Enzymatic Nucleic acid
cuuucucagccgaaaggcgagugaggucucuucuggg

SEQ ID NO: 6202 - RNA, 37 nt, Artificial Sequence
  Description of Artificial Sequence:  Enzymatic Nucleic acid
aauuuuaagccgaaaggcgagugaggucuuuucucac

SEQ ID NO: 6203 - RNA, 37 nt, Artificial Sequence
  Description of Artificial Sequence:  Enzymatic Nucleic acid
gauagcgagccgaaaggcgagugaggucugggaauuu

SEQ ID NO: 6204 - RNA, 37 nt, Artificial Sequence
  Description of Artificial Sequence:  Enzymatic Nucleic acid
cuugauaggccgaaaggcgagugaggucugacgggaa

SEQ ID NO: 6205 - RNA, 37 nt, Artificial Sequence
  Description of Artificial Sequence:  Enzymatic Nucleic acid
agauguuggccgaaaggcgagugaggucuuucucuua

SEQ ID NO: 6206 - RNA, 37 nt, Artificial Sequence
  Description of Artificial Sequence:  Enzymatic Nucleic acid
cuuguugggccgaaaggcgagugaggucuuuucggag

SEQ ID NO: 6207 - RNA, 37 nt, Artificial Sequence
  Description of Artificial Sequence:  Enzymatic Nucleic acid
cacguagggccgaaaggcgagugaggucuuucaucga

SEQ ID NO: 6208 - RNA, 37 nt, Artificial Sequence
  Description of Artificial Sequence:  Enzymatic Nucleic acid
ggccaucagccgaaaggcgagugaggucuguaggcuu

SEQ ID NO: 6209 - RNA, 37 nt, Artificial Sequence
  Description of Artificial Sequence:  Enzymatic Nucleic acid
cacgcugggccgaaaggcgagugaggucucaucacgu

SEQ ID NO: 6210 - RNA, 37 nt, Artificial Sequence
  Description of Artificial Sequence:  Enzymatic Nucleic acid
uguccacggccgaaaggcgagugaggucuuggccauc

SEQ ID NO: 6211 - RNA, 37 nt, Artificial Sequence
  Description of Artificial Sequence:  Enzymatic Nucleic acid
guuguccagccgaaaggcgagugaggucugcuggcca

SEQ ID NO: 6212 - RNA, 37 nt, Artificial Sequence
  Description of Artificial Sequence:  Enzymatic Nucleic acid
gcggcacagccgaaaggcgagugaggucugugggggu

SEQ ID NO: 6213 - RNA, 37 nt, Artificial Sequence
  Description of Artificial Sequence:  Enzymatic Nucleic acid
aggcggcagccgaaaggcgagugaggucuacgugggg

SEQ ID NO: 6214 - RNA, 37 nt, Artificial Sequence
  Description of Artificial Sequence:  Enzymatic Nucleic acid
gcaggcgggccgaaaggcgagugaggucuacacgugg

SEQ ID NO: 6215 - RNA, 37 nt, Artificial Sequence
  Description of Artificial Sequence:  Enzymatic Nucleic acid
ccagcagggccgaaaggcgagugaggucuggcacacg

SEQ ID NO: 6216 - RNA, 37 nt, Artificial Sequence
  Description of Artificial Sequence:  Enzymatic Nucleic acid
augcccaggccgaaaggcgagugaggucuaggcggca

SEQ ID NO: 6217 - RNA, 37 nt, Artificial Sequence
  Description of Artificial Sequence:  Enzymatic Nucleic acid
ggcagauggccgaaaggcgagugaggucuccagcagg

SEQ ID NO: 6218 - RNA, 37 nt, Artificial Sequence
  Description of Artificial Sequence:  Enzymatic Nucleic acid
aggugagggccgaaaggcgagugaggucuagaugccc

SEQ ID NO: 6219 - RNA, 37 nt, Artificial Sequence
  Description of Artificial Sequence:  Enzymatic Nucleic acid
gaguugcagccgaaaggcgagugaggucugguggagg

SEQ ID NO: 6220 - RNA, 37 nt, Artificial Sequence
  Description of Artificial Sequence:  Enzymatic Nucleic acid
augaguuggccgaaaggcgagugaggucuacggugga

SEQ ID NO: 6221 - RNA, 37 nt, Artificial Sequence
  Description of Artificial Sequence:  Enzymatic Nucleic acid
augagcuggccgaaaggcgagugaggucugugaugag

SEQ ID NO: 6222 - RNA, 37 nt, Artificial Sequence
  Description of Artificial Sequence:  Enzymatic Nucleic acid
ggcaugaggccgaaaggcgagugaggucuugcgugau

SEQ ID NO: 6223 - RNA, 37 nt, Artificial Sequence
  Description of Artificial Sequence:  Enzymatic Nucleic acid
ccgaaggggccgaaaggcgagugaggucuaugagcug

SEQ ID NO: 6224 - RNA, 37 nt, Artificial Sequence
  Description of Artificial Sequence:  Enzymatic Nucleic acid
ggaggcaggccgaaaggcgagugaggucucgaagggc

SEQ ID NO: 6225 - RNA, 37 nt, Artificial Sequence
  Description of Artificial Sequence:  Enzymatic Nucleic acid
ccaggagggccgaaaggcgagugaggucuagccgaag

SEQ ID NO: 6226 - RNA, 37 nt, Artificial Sequence
  Description of Artificial Sequence:  Enzymatic Nucleic acid
uucccggagccgaaaggcgagugaggucuauagucca

SEQ ID NO: 6227 - RNA, 37 nt, Artificial Sequence
  Description of Artificial Sequence:  Enzymatic Nucleic acid
acugggaggccgaaaggcgagugaggucucaauauug

SEQ ID NO: 6228 - RNA, 37 nt, Artificial Sequence
  Description of Artificial Sequence:  Enzymatic Nucleic acid
agcagguagccgaaaggcgagugaggucuugggagcc

SEQ ID NO: 6229 - RNA, 37 nt, Artificial Sequence
  Description of Artificial Sequence:  Enzymatic Nucleic acid
caguugaggccgaaaggcgagugaggucuagguacug

SEQ ID NO: 6230 - RNA, 37 nt, Artificial Sequence
  Description of Artificial Sequence:  Enzymatic Nucleic acid
ugcacacagccgaaaggcgagugaggucucaguugag

SEQ ID NO: 6231 - RNA, 37 nt, Artificial Sequence
  Description of Artificial Sequence:  Enzymatic Nucleic acid
ucugcacagccgaaaggcgagugaggucuaccaguug

SEQ ID NO: 6232 - RNA, 37 nt, Artificial Sequence
  Description of Artificial Sequence:  Enzymatic Nucleic acid
gaucugcagccgaaaggcgagugaggucuacaccagu

SEQ ID NO: 6233 - RNA, 37 nt, Artificial Sequence
  Description of Artificial Sequence:  Enzymatic Nucleic acid
gcgaucuggccgaaaggcgagugaggucuacacacca

SEQ ID NO: 6234 - RNA, 37 nt, Artificial Sequence
  Description of Artificial Sequence:  Enzymatic Nucleic acid
gcccuuuggccgaaaggcgagugaggucugaucugca

SEQ ID NO: 6235 - RNA, 37 nt, Artificial Sequence
  Description of Artificial Sequence:  Enzymatic Nucleic acid
aguucauggccgaaaggcgagugaggucuccuuugcg

SEQ ID NO: 6236 - RNA, 37 nt, Artificial Sequence
  Description of Artificial Sequence:  Enzymatic Nucleic acid
ccaagcgagccgaaaggcgagugaggucugguccucc

SEQ ID NO: 6237 - RNA, 37 nt, Artificial Sequence
  Description of Artificial Sequence:  Enzymatic Nucleic acid
gcaccaaggccgaaaggcgagugaggucugacggucc

SEQ ID NO: 6238 - RNA, 37 nt, Artificial Sequence
  Description of Artificial Sequence:  Enzymatic Nucleic acid
gcggugcagccgaaaggcgagugaggucucaagcgac

SEQ ID NO: 6239 - RNA, 37 nt, Artificial Sequence
  Description of Artificial Sequence:  Enzymatic Nucleic acid
ucgcgguggccgaaaggcgagugaggucuaccaagcg

SEQ ID NO: 6240 - RNA, 37 nt, Artificial Sequence
  Description of Artificial Sequence:  Enzymatic Nucleic acid
ccaggucggccgaaaggcgagugaggucuggugcacc

SEQ ID NO: 6241 - RNA, 37 nt, Artificial Sequence
  Description of Artificial Sequence:  Enzymatic Nucleic acid
ccuggcuggccgaaaggcgagugaggucucaggucgc

SEQ ID NO: 6242 - RNA, 37 nt, Artificial Sequence
  Description of Artificial Sequence:  Enzymatic Nucleic acid
guuccugggccgaaaggcgagugaggucuugccaggu

SEQ ID NO: 6243 - RNA, 37 nt, Artificial Sequence
  Description of Artificial Sequence:  Enzymatic Nucleic acid
caccaguagccgaaaggcgagugaggucuguuccugg

SEQ ID NO: 6244 - RNA, 37 nt, Artificial Sequence
  Description of Artificial Sequence:  Enzymatic Nucleic acid
uguuuucagccgaaaggcgagugaggucucaguacgu

SEQ ID NO: 6245 - RNA, 37 nt, Artificial Sequence
  Description of Artificial Sequence:  Enzymatic Nucleic acid
acaugcuggccgaaaggcgagugaggucugguguuuu

SEQ ID NO: 6246 - RNA, 37 nt, Artificial Sequence
  Description of Artificial Sequence:  Enzymatic Nucleic acid
uugacauggccgaaaggcgagugaggucuugcggugu

SEQ ID NO: 6247 - RNA, 37 nt, Artificial Sequence
  Description of Artificial Sequence:  Enzymatic Nucleic acid
gaucuugagccgaaaggcgagugaggucuaugcugcg

SEQ ID NO: 6248 - RNA, 37 nt, Artificial Sequence
  Description of Artificial Sequence:  Enzymatic Nucleic acid
uuggccaggccgaaaggcgagugaggucuccaaaauc

SEQ ID NO: 6249 - RNA, 37 nt, Artificial Sequence
  Description of Artificial Sequence:  Enzymatic Nucleic acid
caguuugggccgaaaggcgagugaggucucagcccaa

SEQ ID NO: 6250 - RNA, 37 nt, Artificial Sequence
  Description of Artificial Sequence:  Enzymatic Nucleic acid
gcacccaggccgaaaggcgagugaggucuaguuuggc

SEQ ID NO: 6251 - RNA, 37 nt, Artificial Sequence
  Description of Artificial Sequence:  Enzymatic Nucleic acid
cuuccgcagccgaaaggcgagugaggucuccagcagu

SEQ ID NO: 6252 - RNA, 37 nt, Artificial Sequence
  Description of Artificial Sequence:  Enzymatic Nucleic acid
cucuuccggccgaaaggcgagugaggucuacccagca

SEQ ID NO: 6253 - RNA, 37 nt, Artificial Sequence
  Description of Artificial Sequence:  Enzymatic Nucleic acid
uccuucuggccgaaaggcgagugaggucuaugguauu

SEQ ID NO: 6254 - RNA, 37 nt, Artificial Sequence
  Description of Artificial Sequence:  Enzymatic Nucleic acid
gcacuuuggccgaaaggcgagugaggucucuccuucu

SEQ ID NO: 6255 - RNA, 37 nt, Artificial Sequence
  Description of Artificial Sequence:  Enzymatic Nucleic acid
gauaggcagccgaaaggcgagugaggucuuuugccuc

SEQ ID NO: 6256 - RNA, 37 nt, Artificial Sequence
  Description of Artificial Sequence:  Enzymatic Nucleic acid
uugauagggccgaaaggcgagugaggucuacuuugcc

SEQ ID NO: 6257 - RNA, 37 nt, Artificial Sequence
  Description of Artificial Sequence:  Enzymatic Nucleic acid
gccauccagccgaaaggcgagugaggucuuugauagg

SEQ ID NO: 6258 - RNA, 37 nt, Artificial Sequence
  Description of Artificial Sequence:  Enzymatic Nucleic acid
uuccaauggccgaaaggcgagugaggucucauccacu

SEQ ID NO: 6259 - RNA, 37 nt, Artificial Sequence
  Description of Artificial Sequence:  Enzymatic Nucleic acid
agacaucagccgaaaggcgagugaggucuucuggugg

SEQ ID NO: 6260 - RNA, 37 nt, Artificial Sequence
  Description of Artificial Sequence:  Enzymatic Nucleic acid
gcuccagagccgaaaggcgagugaggucuaucacucu

SEQ ID NO: 6261 - RNA, 37 nt, Artificial Sequence
  Description of Artificial Sequence:  Enzymatic Nucleic acid
ccccguaggccgaaaggcgagugaggucuuccagaca

SEQ ID NO: 6262 - RNA, 37 nt, Artificial Sequence
  Description of Artificial Sequence:  Enzymatic Nucleic acid
aacggucagccgaaaggcgagugaggucucccguagc

SEQ ID NO: 6263 - RNA, 37 nt, Artificial Sequence
  Description of Artificial Sequence:  Enzymatic Nucleic acid
cucccaaagccgaaaggcgagugaggucuggucaccc

SEQ ID NO: 6264 - RNA, 37 nt, Artificial Sequence
  Description of Artificial Sequence:  Enzymatic Nucleic acid
gucaucaagccgaaaggcgagugaggucuucccaaac

SEQ ID NO: 6265 - RNA, 37 nt, Artificial Sequence
  Description of Artificial Sequence:  Enzymatic Nucleic acid
ucauaugggccgaaaggcgagugaggucuuuggaucc

SEQ ID NO: 6266 - RNA, 37 nt, Artificial Sequence
  Description of Artificial Sequence:  Enzymatic Nucleic acid
cucgcugggccgaaaggcgagugaggucuagggauuc

SEQ ID NO: 6267 - RNA, 37 nt, Artificial Sequence
  Description of Artificial Sequence:  Enzymatic Nucleic acid
agaucucggccgaaaggcgagugaggucuuggcaggg

SEQ ID NO: 6268 - RNA, 37 nt, Artificial Sequence
  Description of Artificial Sequence:  Enzymatic Nucleic acid
gagggagggccgaaaggcgagugaggucuguucuccu

SEQ ID NO: 6269 - RNA, 37 nt, Artificial Sequence
  Description of Artificial Sequence:  Enzymatic Nucleic acid
augggugggccgaaaggcgagugaggucuugagggag

SEQ ID NO: 6270 - RNA, 37 nt, Artificial Sequence
  Description of Artificial Sequence:  Enzymatic Nucleic acid
cgaugguagccgaaaggcgagugaggucuauaugggu

SEQ ID NO: 6271 - RNA, 37 nt, Artificial Sequence
  Description of Artificial Sequence:  Enzymatic Nucleic acid
cauguagagccgaaaggcgagugaggucuaucgaugg

SEQ ID NO: 6272 - RNA, 37 nt, Artificial Sequence
  Description of Artificial Sequence:  Enzymatic Nucleic acid
gcacuugagccgaaaggcgagugaggucucaugauca

SEQ ID NO: 6273 - RNA, 37 nt, Artificial Sequence
  Description of Artificial Sequence:  Enzymatic Nucleic acid
auccagcagccgaaaggcgagugaggucuuugaccau

SEQ ID NO: 6274 - RNA, 37 nt, Artificial Sequence
  Description of Artificial Sequence:  Enzymatic Nucleic acid
ucauccaggccgaaaggcgagugaggucuacuugacc

SEQ ID NO: 6275 - RNA, 37 nt, Artificial Sequence
  Description of Artificial Sequence:  Enzymatic Nucleic acid
acuaucuggccgaaaggcgagugaggucugucuauca

SEQ ID NO: 6276 - RNA, 37 nt, Artificial Sequence
  Description of Artificial Sequence:  Enzymatic Nucleic acid
uugggcgagccgaaaggcgagugaggucuuaucugcg

SEQ ID NO: 6277 - RNA, 37 nt, Artificial Sequence
  Description of Artificial Sequence:  Enzymatic Nucleic acid
acuuuggggccgaaaggcgagugaggucugacuaucu

SEQ ID NO: 6278 - RNA, 37 nt, Artificial Sequence
  Description of Artificial Sequence:  Enzymatic Nucleic acid
ucacggaagccgaaaggcgagugaggucuuuugggcg

SEQ ID NO: 6279 - RNA, 37 nt, Artificial Sequence
  Description of Artificial Sequence:  Enzymatic Nucleic acid
ucaacucagccgaaaggcgagugaggucuggaacuuu

SEQ ID NO: 6280 - RNA, 37 nt, Artificial Sequence
  Description of Artificial Sequence:  Enzymatic Nucleic acid
augaucaagccgaaaggcgagugaggucuucacggaa

SEQ ID NO: 6281 - RNA, 37 nt, Artificial Sequence
  Description of Artificial Sequence:  Enzymatic Nucleic acid
gucucggggccgaaaggcgagugaggucucauuuugg

SEQ ID NO: 6282 - RNA, 37 nt, Artificial Sequence
  Description of Artificial Sequence:  Enzymatic Nucleic acid
agguagcggccgaaaggcgagugaggucuuggggguc

SEQ ID NO: 6283 - RNA, 37 nt, Artificial Sequence
  Description of Artificial Sequence:  Enzymatic Nucleic acid
caagguaggccgaaaggcgagugaggucugcuggggg

SEQ ID NO: 6284 - RNA, 37 nt, Artificial Sequence
  Description of Artificial Sequence:  Enzymatic Nucleic acid
cugaaugagccgaaaggcgagugaggucuaagguagc

SEQ ID NO: 6285 - RNA, 37 nt, Artificial Sequence
  Description of Artificial Sequence:  Enzymatic Nucleic acid
ggcaaauggccgaaaggcgagugaggucuauucuuuc

SEQ ID NO: 6286 - RNA, 37 nt, Artificial Sequence
  Description of Artificial Sequence:  Enzymatic Nucleic acid
ggacuugggccgaaaggcgagugaggucuaaaugcau

SEQ ID NO: 6287 - RNA, 37 nt, Artificial Sequence
  Description of Artificial Sequence:  Enzymatic Nucleic acid
cuguaggagccgaaaggcgagugaggucuuuggcaaa

SEQ ID NO: 6288 - RNA, 37 nt, Artificial Sequence
  Description of Artificial Sequence:  Enzymatic Nucleic acid
ucagggcagccgaaaggcgagugaggucugguagaag

SEQ ID NO: 6289 - RNA, 37 nt, Artificial Sequence
  Description of Artificial Sequence:  Enzymatic Nucleic acid
caucaggggccgaaaggcgagugaggucuacgguaga

SEQ ID NO: 6290 - RNA, 37 nt, Artificial Sequence
  Description of Artificial Sequence:  Enzymatic Nucleic acid
auccaccagccgaaaggcgagugaggucugucgucca

SEQ ID NO: 6291 - RNA, 37 nt, Artificial Sequence
  Description of Artificial Sequence:  Enzymatic Nucleic acid
ggcauccagccgaaaggcgagugaggucucacgucgu

SEQ ID NO: 6292 - RNA, 37 nt, Artificial Sequence
  Description of Artificial Sequence:  Enzymatic Nucleic acid
cucgucgggccgaaaggcgagugaggucuauccacca

SEQ ID NO: 6293 - RNA, 37 nt, Artificial Sequence
  Description of Artificial Sequence:  Enzymatic Nucleic acid
augagguagccgaaaggcgagugaggucuucgucggc

SEQ ID NO: 6294 - RNA, 37 nt, Artificial Sequence
  Description of Artificial Sequence:  Enzymatic Nucleic acid
aagcccuggccgaaaggcgagugaggucuugugggau

SEQ ID NO: 6295 - RNA, 37 nt, Artificial Sequence
  Description of Artificial Sequence:  Enzymatic Nucleic acid
ugaagaaggccgaaaggcgagugaggucuccugcugu

SEQ ID NO: 6296 - RNA, 37 nt, Artificial Sequence
  Description of Artificial Sequence:  Enzymatic Nucleic acid
aggggcuggccgaaaggcgagugaggucuugaagaag

SEQ ID NO: 6297 - RNA, 37 nt, Artificial Sequence
  Description of Artificial Sequence:  Enzymatic Nucleic acid
uggagggggccgaaaggcgagugaggucuugcugaag

SEQ ID NO: 6298 - RNA, 37 nt, Artificial Sequence
  Description of Artificial Sequence:  Enzymatic Nucleic acid
guccgugagccgaaaggcgagugaggucuguggaggg

SEQ ID NO: 6299 - RNA, 37 nt, Artificial Sequence
  Description of Artificial Sequence:  Enzymatic Nucleic acid
ucagagaggccgaaaggcgagugaggucuucaggagg

SEQ ID NO: 6300 - RNA, 37 nt, Artificial Sequence
  Description of Artificial Sequence:  Enzymatic Nucleic acid
ugguugcagccgaaaggcgagugaggucuucagagag

SEQ ID NO: 6301 - RNA, 37 nt, Artificial Sequence
  Description of Artificial Sequence:  Enzymatic Nucleic acid
gcugguuggccgaaaggcgagugaggucuacucagag

SEQ ID NO: 6302 - RNA, 37 nt, Artificial Sequence
  Description of Artificial Sequence:  Enzymatic Nucleic acid
aauuguuggccgaaaggcgagugaggucuugguugca

SEQ ID NO: 6303 - RNA, 37 nt, Artificial Sequence
  Description of Artificial Sequence:  Enzymatic Nucleic acid
gcaagccagccgaaaggcgagugaggucugguggaau

SEQ ID NO: 6304 - RNA, 37 nt, Artificial Sequence
  Description of Artificial Sequence:  Enzymatic Nucleic acid
aaugcaaggccgaaaggcgagugaggucucacggugg

SEQ ID NO: 6305 - RNA, 37 nt, Artificial Sequence
  Description of Artificial Sequence:  Enzymatic Nucleic acid
uaucaauggccgaaaggcgagugaggucuaagccacg

SEQ ID NO: 6306 - RNA, 37 nt, Artificial Sequence
  Description of Artificial Sequence:  Enzymatic Nucleic acid
cuuugcaggccgaaaggcgagugaggucuccauuucu

SEQ ID NO: 6307 - RNA, 37 nt, Artificial Sequence
  Description of Artificial Sequence:  Enzymatic Nucleic acid
cagcuuuggccgaaaggcgagugaggucuagcccauu

SEQ ID NO: 6308 - RNA, 37 nt, Artificial Sequence
  Description of Artificial Sequence:  Enzymatic Nucleic acid
ugggacaggccgaaaggcgagugaggucuuuugcagc

SEQ ID NO: 6309 - RNA, 37 nt, Artificial Sequence
  Description of Artificial Sequence:  Enzymatic Nucleic acid
ugaugggagccgaaaggcgagugaggucuagcuuugc

SEQ ID NO: 6310 - RNA, 37 nt, Artificial Sequence
  Description of Artificial Sequence:  Enzymatic Nucleic acid
gcaagaaggccgaaaggcgagugaggucuugucuucc

SEQ ID NO: 6311 - RNA, 37 nt, Artificial Sequence
  Description of Artificial Sequence:  Enzymatic Nucleic acid
uaucgcuggccgaaaggcgagugaggucuaagaagcu

SEQ ID NO: 6312 - RNA, 37 nt, Artificial Sequence
  Description of Artificial Sequence:  Enzymatic Nucleic acid
cuguaucggccgaaaggcgagugaggucuugcaagaa

SEQ ID NO: 6313 - RNA, 37 nt, Artificial Sequence
  Description of Artificial Sequence:  Enzymatic Nucleic acid
ggucugaggccgaaaggcgagugaggucuuguaucgc

SEQ ID NO: 6314 - RNA, 37 nt, Artificial Sequence
  Description of Artificial Sequence:  Enzymatic Nucleic acid
ucaaggcggccgaaaggcgagugaggucucugugggg

SEQ ID NO: 6315 - RNA, 37 nt, Artificial Sequence
  Description of Artificial Sequence:  Enzymatic Nucleic acid
agucaagggccgaaaggcgagugaggucugccugugg

SEQ ID NO: 6316 - RNA, 37 nt, Artificial Sequence
  Description of Artificial Sequence:  Enzymatic Nucleic acid
cgucuauggccgaaaggcgagugaggucuuguccuca

SEQ ID NO: 6317 - RNA, 37 nt, Artificial Sequence
  Description of Artificial Sequence:  Enzymatic Nucleic acid
uucaggcagccgaaaggcgagugaggucuugggagga

SEQ ID NO: 6318 - RNA, 37 nt, Artificial Sequence
  Description of Artificial Sequence:  Enzymatic Nucleic acid
uauucagggccgaaaggcgagugaggucuacugggag

SEQ ID NO: 6319 - RNA, 37 nt, Artificial Sequence
  Description of Artificial Sequence:  Enzymatic Nucleic acid
ggaacggagccgaaaggcgagugaggucuugguuuau

SEQ ID NO: 6320 - RNA, 37 nt, Artificial Sequence
  Description of Artificial Sequence:  Enzymatic Nucleic acid
uuugggaagccgaaaggcgagugaggucuggacuggu

SEQ ID NO: 6321 - RNA, 37 nt, Artificial Sequence
  Description of Artificial Sequence:  Enzymatic Nucleic acid
ccagcggggccgaaaggcgagugaggucucuuuuggg

SEQ ID NO: 6322 - RNA, 37 nt, Artificial Sequence
  Description of Artificial Sequence:  Enzymatic Nucleic acid
agagccaggccgaaaggcgagugaggucugggccuuu

SEQ ID NO: 6323 - RNA, 37 nt, Artificial Sequence
  Description of Artificial Sequence:  Enzymatic Nucleic acid
gcacagaggccgaaaggcgagugaggucucagcgggc

SEQ ID NO: 6324 - RNA, 37 nt, Artificial Sequence
  Description of Artificial Sequence:  Enzymatic Nucleic acid
auucugcagccgaaaggcgagugaggucuagagccag

SEQ ID NO: 6325 - RNA, 37 nt, Artificial Sequence
  Description of Artificial Sequence:  Enzymatic Nucleic acid
ggauucuggccgaaaggcgagugaggucuacagagcc

SEQ ID NO: 6326 - RNA, 37 nt, Artificial Sequence
  Description of Artificial Sequence:  Enzymatic Nucleic acid
gugauagagccgaaaggcgagugaggucuaggauucu

SEQ ID NO: 6327 - RNA, 37 nt, Artificial Sequence
  Description of Artificial Sequence:  Enzymatic Nucleic acid
uucagagggccgaaaggcgagugaggucuugauugug

SEQ ID NO: 6328 - RNA, 37 nt, Artificial Sequence
  Description of Artificial Sequence:  Enzymatic Nucleic acid
gcugggcggccgaaaggcgagugaggucugggguuca

SEQ ID NO: 6329 - RNA, 37 nt, Artificial Sequence
  Description of Artificial Sequence:  Enzymatic Nucleic acid
cugcuggggccgaaaggcgagugaggucugcgggguu

SEQ ID NO: 6330 - RNA, 37 nt, Artificial Sequence
  Description of Artificial Sequence:  Enzymatic Nucleic acid
ggucucuggccgaaaggcgagugaggucuugggcgcg

SEQ ID NO: 6331 - RNA, 37 nt, Artificial Sequence
  Description of Artificial Sequence:  Enzymatic Nucleic acid
cugcaguggccgaaaggcgagugaggucuuguggggg

SEQ ID NO: 6332 - RNA, 37 nt, Artificial Sequence
  Description of Artificial Sequence:  Enzymatic Nucleic acid
gcccacuggccgaaaggcgagugaggucuagugcugu

SEQ ID NO: 6333 - RNA, 37 nt, Artificial Sequence
  Description of Artificial Sequence:  Enzymatic Nucleic acid
guugcccagccgaaaggcgagugaggucuugcagugc

SEQ ID NO: 6334 - RNA, 37 nt, Artificial Sequence
  Description of Artificial Sequence:  Enzymatic Nucleic acid
cgggguuggccgaaaggcgagugaggucuccacugca

SEQ ID NO: 6335 - RNA, 37 nt, Artificial Sequence
  Description of Artificial Sequence:  Enzymatic Nucleic acid
uugagauagccgaaaggcgagugaggucuucgggguu

SEQ ID NO: 6336 - RNA, 37 nt, Artificial Sequence
  Description of Artificial Sequence:  Enzymatic Nucleic acid
gggcuggagccgaaaggcgagugaggucuaguguuga

SEQ ID NO: 6337 - RNA, 37 nt, Artificial Sequence
  Description of Artificial Sequence:  Enzymatic Nucleic acid
cagguggggccgaaaggcgagugaggucuuggacagu

SEQ ID NO: 6338 - RNA, 37 nt, Artificial Sequence
  Description of Artificial Sequence:  Enzymatic Nucleic acid
uguugacagccgaaaggcgagugaggucuaggugggc

SEQ ID NO: 6339 - RNA, 37 nt, Artificial Sequence
  Description of Artificial Sequence:  Enzymatic Nucleic acid
gcuguugagccgaaaggcgagugaggucuacaggugg

SEQ ID NO: 6340 - RNA, 37 nt, Artificial Sequence
  Description of Artificial Sequence:  Enzymatic Nucleic acid
cgaauguggccgaaaggcgagugaggucuuguugaca

SEQ ID NO: 6341 - RNA, 37 nt, Artificial Sequence
  Description of Artificial Sequence:  Enzymatic Nucleic acid
gggcaggggccgaaaggcgagugaggucuugucgaau

SEQ ID NO: 6342 - RNA, 37 nt, Artificial Sequence
  Description of Artificial Sequence:  Enzymatic Nucleic acid
ccaguggggccgaaaggcgagugaggucuagggcugu

SEQ ID NO: 6343 - RNA, 37 nt, Artificial Sequence
  Description of Artificial Sequence:  Enzymatic Nucleic acid
uuucuggggccgaaaggcgagugaggucuccaguggg

SEQ ID NO: 6344 - RNA, 37 nt, Artificial Sequence
  Description of Artificial Sequence:  Enzymatic Nucleic acid
gguggcuggccgaaaggcgagugaggucucuuucugg

SEQ ID NO: 6345 - RNA, 37 nt, Artificial Sequence
  Description of Artificial Sequence:  Enzymatic Nucleic acid
uuuggugggccgaaaggcgagugaggucuugccuuuc

SEQ ID NO: 6346 - RNA, 37 nt, Artificial Sequence
  Description of Artificial Sequence:  Enzymatic Nucleic acid
uguccagggccgaaaggcgagugaggucuuaauuugg

SEQ ID NO: 6347 - RNA, 37 nt, Artificial Sequence
  Description of Artificial Sequence:  Enzymatic Nucleic acid
aaguccuggccgaaaggcgagugaggucuugguaguc

SEQ ID NO: 6348 - RNA, 37 nt, Artificial Sequence
  Description of Artificial Sequence:  Enzymatic Nucleic acid
uggcuugggccgaaaggcgagugaggucuuuccuugg

SEQ ID NO: 6349 - RNA, 37 nt, Artificial Sequence
  Description of Artificial Sequence:  Enzymatic Nucleic acid
ccauuugggccgaaaggcgagugaggucuuuggcuuc

SEQ ID NO: 6350 - RNA, 37 nt, Artificial Sequence
  Description of Artificial Sequence:  Enzymatic Nucleic acid
uaaagauggccgaaaggcgagugaggucucauuuggc

SEQ ID NO: 6351 - RNA, 37 nt, Artificial Sequence
  Description of Artificial Sequence:  Enzymatic Nucleic acid
cuguggaggccgaaaggcgagugaggucuccuuaaag

SEQ ID NO: 6352 - RNA, 37 nt, Artificial Sequence
  Description of Artificial Sequence:  Enzymatic Nucleic acid
auuuucaggccgaaaggcgagugaggucuuguggagc

SEQ ID NO: 6353 - RNA, 37 nt, Artificial Sequence
  Description of Artificial Sequence:  Enzymatic Nucleic acid
guauucuggccgaaaggcgagugaggucuauuuucag

SEQ ID NO: 6354 - RNA, 37 nt, Artificial Sequence
  Description of Artificial Sequence:  Enzymatic Nucleic acid
uggcgcgagccgaaaggcgagugaggucuccuuaggu

SEQ ID NO: 6355 - RNA, 37 nt, Artificial Sequence
  Description of Artificial Sequence:  Enzymatic Nucleic acid
uuguggcggccgaaaggcgagugaggucugacccuua

SEQ ID NO: 6356 - RNA, 37 nt, Artificial Sequence
  Description of Artificial Sequence:  Enzymatic Nucleic acid
cuuugugggccgaaaggcgagugaggucugcgacccu

SEQ ID NO: 6357 - RNA, 37 nt, Artificial Sequence
  Description of Artificial Sequence:  Enzymatic Nucleic acid
auucacuggccgaaaggcgagugaggucuuuuguggc

SEQ ID NO: 6358 - RNA, 37 nt, Artificial Sequence
  Description of Artificial Sequence:  Enzymatic Nucleic acid
uaaauucagccgaaaggcgagugaggucuugcuuugu

SEQ ID NO: 6359 - RNA, 37 nt, Artificial Sequence
  Description of Artificial Sequence:  Enzymatic Nucleic acid
uggucauggccgaaaggcgagugaggucuuccaauaa

SEQ ID NO: 6360 - RNA, 37 nt, Artificial Sequence
  Description of Artificial Sequence:  Enzymatic Nucleic acid
ggcucauagccgaaaggcgagugaggucuuauccucc

SEQ ID NO: 6361 - RNA, 37 nt, Artificial Sequence
  Description of Artificial Sequence:  Enzymatic Nucleic acid
uuuuaggggccgaaaggcgagugaggucuucauacua

SEQ ID NO: 6362 - RNA, 37 nt, Artificial Sequence
  Description of Artificial Sequence:  Enzymatic Nucleic acid
ugcugugggccgaaaggcgagugaggucuuugguccu

SEQ ID NO: 6363 - RNA, 37 nt, Artificial Sequence
  Description of Artificial Sequence:  Enzymatic Nucleic acid
aggaccuggccgaaaggcgagugaggucuuguggcuu

SEQ ID NO: 6364 - RNA, 37 nt, Artificial Sequence
  Description of Artificial Sequence:  Enzymatic Nucleic acid
auggaggagccgaaaggcgagugaggucucugcugug

SEQ ID NO: 6365 - RNA, 37 nt, Artificial Sequence
  Description of Artificial Sequence:  Enzymatic Nucleic acid
gggcaugggccgaaaggcgagugaggucuuguuggga

SEQ ID NO: 6366 - RNA, 37 nt, Artificial Sequence
  Description of Artificial Sequence:  Enzymatic Nucleic acid
aaugcggggccgaaaggcgagugaggucuauggcugu

SEQ ID NO: 6367 - RNA, 37 nt, Artificial Sequence
  Description of Artificial Sequence:  Enzymatic Nucleic acid
agcuaauggccgaaaggcgagugaggucugggcaugg

SEQ ID NO: 6368 - RNA, 37 nt, Artificial Sequence
  Description of Artificial Sequence:  Enzymatic Nucleic acid
ucuaagaggccgaaaggcgagugaggucuuaaugcgg

SEQ ID NO: 6369 - RNA, 37 nt, Artificial Sequence
  Description of Artificial Sequence:  Enzymatic Nucleic acid
uugcaaaagccgaaaggcgagugaggucucagucugu

SEQ ID NO: 6370 - RNA, 37 nt, Artificial Sequence
  Description of Artificial Sequence:  Enzymatic Nucleic acid
aaacguuggccgaaaggcgagugaggucuaaaaccag

SEQ ID NO: 6371 - RNA, 37 nt, Artificial Sequence
  Description of Artificial Sequence:  Enzymatic Nucleic acid
gguguaaagccgaaaggcgagugaggucuguugcaaa

SEQ ID NO: 6372 - RNA, 37 nt, Artificial Sequence
  Description of Artificial Sequence:  Enzymatic Nucleic acid
cuuccugggccgaaaggcgagugaggucuuagucggu

SEQ ID NO: 6373 - RNA, 37 nt, Artificial Sequence
  Description of Artificial Sequence:  Enzymatic Nucleic acid
uggaaguagccgaaaggcgagugaggucuuuccuggc

SEQ ID NO: 6374 - RNA, 37 nt, Artificial Sequence
  Description of Artificial Sequence:  Enzymatic Nucleic acid
aaaauguggccgaaaggcgagugaggucuccgaggug

SEQ ID NO: 6375 - RNA, 37 nt, Artificial Sequence
  Description of Artificial Sequence:  Enzymatic Nucleic acid
gaaugcaagccgaaaggcgagugaggucuuucccaaa

SEQ ID NO: 6376 - RNA, 37 nt, Artificial Sequence
  Description of Artificial Sequence:  Enzymatic Nucleic acid
aaggaauggccgaaaggcgagugaggucuaacuuccc

SEQ ID NO: 6377 - RNA, 37 nt, Artificial Sequence
  Description of Artificial Sequence:  Enzymatic Nucleic acid
uuugaagagccgaaaggcgagugaggucuaaaggaau

SEQ ID NO: 6378 - RNA, 37 nt, Artificial Sequence
  Description of Artificial Sequence:  Enzymatic Nucleic acid
augcuucagccgaaaggcgagugaggucuaguuugaa

SEQ ID NO: 6379 - RNA, 37 nt, Artificial Sequence
  Description of Artificial Sequence:  Enzymatic Nucleic acid
uguaaauggccgaaaggcgagugaggucuuucacagu

SEQ ID NO: 6380 - RNA, 37 nt, Artificial Sequence
  Description of Artificial Sequence:  Enzymatic Nucleic acid
gcuggauggccgaaaggcgagugaggucuguuucugu

SEQ ID NO: 6381 - RNA, 37 nt, Artificial Sequence
  Description of Artificial Sequence:  Enzymatic Nucleic acid
uauucuuggccgaaaggcgagugaggucuuggaugcg

SEQ ID NO: 6382 - RNA, 37 nt, Artificial Sequence
  Description of Artificial Sequence:  Enzymatic Nucleic acid
caaagggagccgaaaggcgagugaggucuaauauucu

SEQ ID NO: 6383 - RNA, 37 nt, Artificial Sequence
  Description of Artificial Sequence:  Enzymatic Nucleic acid
aauuucuggccgaaaggcgagugaggucuucaaaggg

SEQ ID NO: 6384 - RNA, 37 nt, Artificial Sequence
  Description of Artificial Sequence:  Enzymatic Nucleic acid
caaauauagccgaaaggcgagugaggucucucuuuga

SEQ ID NO: 6385 - RNA, 37 nt, Artificial Sequence
  Description of Artificial Sequence:  Enzymatic Nucleic acid
cacauauagccgaaaggcgagugaggucuuuuuuuuu

SEQ ID NO: 6386 - RNA, 37 nt, Artificial Sequence
  Description of Artificial Sequence:  Enzymatic Nucleic acid
aauccucagccgaaaggcgagugaggucuauauacuu

SEQ ID NO: 6387 - RNA, 37 nt, Artificial Sequence
  Description of Artificial Sequence:  Enzymatic Nucleic acid
augaaaaagccgaaaggcgagugaggucuuccaagau

SEQ ID NO: 6388 - RNA, 37 nt, Artificial Sequence
  Description of Artificial Sequence:  Enzymatic Nucleic acid
aauagcgagccgaaaggcgagugaggucuaaugaaaa

SEQ ID NO: 6389 - RNA, 37 nt, Artificial Sequence
  Description of Artificial Sequence:  Enzymatic Nucleic acid
aucaauaggccgaaaggcgagugaggucugacaauga

SEQ ID NO: 6390 - RNA, 37 nt, Artificial Sequence
  Description of Artificial Sequence:  Enzymatic Nucleic acid
uggaagaggccgaaaggcgagugaggucuccauugaa

SEQ ID NO: 6391 - RNA, 37 nt, Artificial Sequence
  Description of Artificial Sequence:  Enzymatic Nucleic acid
ccagcaaggccgaaaggcgagugaggucuuucuuccu

SEQ ID NO: 6392 - RNA, 37 nt, Artificial Sequence
  Description of Artificial Sequence:  Enzymatic Nucleic acid
gcuaccaggccgaaaggcgagugaggucuaagcuucu

SEQ ID NO: 6393 - RNA, 37 nt, Artificial Sequence
  Description of Artificial Sequence:  Enzymatic Nucleic acid
aagugcuagccgaaaggcgagugaggucucagcaagc

SEQ ID NO: 6394 - RNA, 37 nt, Artificial Sequence
  Description of Artificial Sequence:  Enzymatic Nucleic acid
agcaaguggccgaaaggcgagugaggucuuaccagca

SEQ ID NO: 6395 - RNA, 37 nt, Artificial Sequence
  Description of Artificial Sequence:  Enzymatic Nucleic acid
caggguaggccgaaaggcgagugaggucuaagugcua

SEQ ID NO: 6396 - RNA, 37 nt, Artificial Sequence
  Description of Artificial Sequence:  Enzymatic Nucleic acid
uggaugaagccgaaaggcgagugaggucuucagggua

SEQ ID NO: 6397 - RNA, 37 nt, Artificial Sequence
  Description of Artificial Sequence:  Enzymatic Nucleic acid
caguuggggccgaaaggcgagugaggucucuggauga

SEQ ID NO: 6398 - RNA, 37 nt, Artificial Sequence
  Description of Artificial Sequence:  Enzymatic Nucleic acid
cuugcucagccgaaaggcgagugaggucuaguugggc

SEQ ID NO: 6399 - RNA, 37 nt, Artificial Sequence
  Description of Artificial Sequence:  Enzymatic Nucleic acid
gcuccuuggccgaaaggcgagugaggucuucacaguu

SEQ ID NO: 6400 - RNA, 37 nt, Artificial Sequence
  Description of Artificial Sequence:  Enzymatic Nucleic acid
ggcuuguggccgaaaggcgagugaggucuuccuugcu

SEQ ID NO: 6401 - RNA, 37 nt, Artificial Sequence
  Description of Artificial Sequence:  Enzymatic Nucleic acid
acuugugggccgaaaggcgagugaggucuuugugcuc

SEQ ID NO: 6402 - RNA, 37 nt, Artificial Sequence
  Description of Artificial Sequence:  Enzymatic Nucleic acid
cuggaagagccgaaaggcgagugaggucuuuguggcu

SEQ ID NO: 6403 - RNA, 37 nt, Artificial Sequence
  Description of Artificial Sequence:  Enzymatic Nucleic acid
gaaucaaggccgaaaggcgagugaggucuauccucug

SEQ ID NO: 6404 - RNA, 37 nt, Artificial Sequence
  Description of Artificial Sequence:  Enzymatic Nucleic acid
cagaaccagccgaaaggcgagugaggucuuggaauca

SEQ ID NO: 6405 - RNA, 37 nt, Artificial Sequence
  Description of Artificial Sequence:  Enzymatic Nucleic acid
aagcagaagccgaaaggcgagugaggucucacuggaa

SEQ ID NO: 6406 - RNA, 37 nt, Artificial Sequence
  Description of Artificial Sequence:  Enzymatic Nucleic acid
ccuugaaggccgaaaggcgagugaggucuagaaccac

SEQ ID NO: 6407 - RNA, 37 nt, Artificial Sequence
  Description of Artificial Sequence:  Enzymatic Nucleic acid
aguggaaggccgaaaggcgagugaggucucuugaagc

SEQ ID NO: 6408 - RNA, 37 nt, Artificial Sequence
  Description of Artificial Sequence:  Enzymatic Nucleic acid
guguuuuggccgaaaggcgagugaggucuaguggaag

SEQ ID NO: 6409 - RNA, 37 nt, Artificial Sequence
  Description of Artificial Sequence:  Enzymatic Nucleic acid
caugaagggccgaaaggcgagugaggucucuucuugg

SEQ ID NO: 6410 - RNA, 37 nt, Artificial Sequence
  Description of Artificial Sequence:  Enzymatic Nucleic acid
ugcugggggccgaaaggcgagugaggucucaugaagg

SEQ ID NO: 6411 - RNA, 37 nt, Artificial Sequence
  Description of Artificial Sequence:  Enzymatic Nucleic acid
ccggccuggccgaaaggcgagugaggucuuggggcca

SEQ ID NO: 6412 - RNA, 37 nt, Artificial Sequence
  Description of Artificial Sequence:  Enzymatic Nucleic acid
cgauccgggccgaaaggcgagugaggucucugcuggg

SEQ ID NO: 6413 - RNA, 37 nt, Artificial Sequence
  Description of Artificial Sequence:  Enzymatic Nucleic acid
auacaguagccgaaaggcgagugaggucucgauccgg

SEQ ID NO: 6414 - RNA, 37 nt, Artificial Sequence
  Description of Artificial Sequence:  Enzymatic Nucleic acid
acuugauagccgaaaggcgagugaggucuaguaccga

SEQ ID NO: 6415 - RNA, 37 nt, Artificial Sequence
  Description of Artificial Sequence:  Enzymatic Nucleic acid
ugccaugagccgaaaggcgagugaggucuuugauaca

SEQ ID NO: 6416 - RNA, 37 nt, Artificial Sequence
  Description of Artificial Sequence:  Enzymatic Nucleic acid
uguaccuggccgaaaggcgagugaggucucaugacuu

SEQ ID NO: 6417 - RNA, 37 nt, Artificial Sequence
  Description of Artificial Sequence:  Enzymatic Nucleic acid
cuacuguagccgaaaggcgagugaggucucugccaug

SEQ ID NO: 6418 - RNA, 37 nt, Artificial Sequence
  Description of Artificial Sequence:  Enzymatic Nucleic acid
uuauccuagccgaaaggcgagugaggucuuguaccug

SEQ ID NO: 6419 - RNA, 37 nt, Artificial Sequence
  Description of Artificial Sequence:  Enzymatic Nucleic acid
cagagugggccgaaaggcgagugaggucuuuauccua

SEQ ID NO: 6420 - RNA, 37 nt, Artificial Sequence
  Description of Artificial Sequence:  Enzymatic Nucleic acid
ggaagggagccgaaaggcgagugaggucuagaguggc

SEQ ID NO: 6421 - RNA, 37 nt, Artificial Sequence
  Description of Artificial Sequence:  Enzymatic Nucleic acid
cuucuuuggccgaaaggcgagugaggucuccaggaag

SEQ ID NO: 6422 - RNA, 37 nt, Artificial Sequence
  Description of Artificial Sequence:  Enzymatic Nucleic acid
cauuuuuagccgaaaggcgagugaggucuaaaaguaa

SEQ ID NO: 6423 - RNA, 37 nt, Artificial Sequence
  Description of Artificial Sequence:  Enzymatic Nucleic acid
cguggggagccgaaaggcgagugaggucuauuuuuac

SEQ ID NO: 6424 - RNA, 37 nt, Artificial Sequence
  Description of Artificial Sequence:  Enzymatic Nucleic acid
aguaaguagccgaaaggcgagugaggucucgugggga

SEQ ID NO: 6425 - RNA, 37 nt, Artificial Sequence
  Description of Artificial Sequence:  Enzymatic Nucleic acid
ggaaaccagccgaaaggcgagugaggucuugguccau

SEQ ID NO: 6426 - RNA, 37 nt, Artificial Sequence
  Description of Artificial Sequence:  Enzymatic Nucleic acid
acuggaaagccgaaaggcgagugaggucucacugguc

SEQ ID NO: 6427 - RNA, 37 nt, Artificial Sequence
  Description of Artificial Sequence:  Enzymatic Nucleic acid
gcucaugagccgaaaggcgagugaggucuuggaaacc

SEQ ID NO: 6428 - RNA, 37 nt, Artificial Sequence
  Description of Artificial Sequence:  Enzymatic Nucleic acid
gucuaacggccgaaaggcgagugaggucuucaugacu

SEQ ID NO: 6429 - RNA, 37 nt, Artificial Sequence
  Description of Artificial Sequence:  Enzymatic Nucleic acid
cagucuaagccgaaaggcgagugaggucugcucauga

SEQ ID NO: 6430 - RNA, 37 nt, Artificial Sequence
  Description of Artificial Sequence:  Enzymatic Nucleic acid
aagacaaagccgaaaggcgagugaggucuaagucagu

SEQ ID NO: 6431 - RNA, 37 nt, Artificial Sequence
  Description of Artificial Sequence:  Enzymatic Nucleic acid
auggaagagccgaaaggcgagugaggucuaaacaagu

SEQ ID NO: 6432 - RNA, 37 nt, Artificial Sequence
  Description of Artificial Sequence:  Enzymatic Nucleic acid
uuucaaaagccgaaaggcgagugaggucuaauggaau

SEQ ID NO: 6433 - RNA, 37 nt, Artificial Sequence
  Description of Artificial Sequence:  Enzymatic Nucleic acid
gcggcauagccgaaaggcgagugaggucuugaguuuc

SEQ ID NO: 6434 - RNA, 37 nt, Artificial Sequence
  Description of Artificial Sequence:  Enzymatic Nucleic acid
aggggcgggccgaaaggcgagugaggucuauacugag

SEQ ID NO: 6435 - RNA, 37 nt, Artificial Sequence
  Description of Artificial Sequence:  Enzymatic Nucleic acid
gacagggggccgaaaggcgagugaggucuggcauacu

SEQ ID NO: 6436 - RNA, 37 nt, Artificial Sequence
  Description of Artificial Sequence:  Enzymatic Nucleic acid
cagcaagagccgaaaggcgagugaggucuaggggcgg

SEQ ID NO: 6437 - RNA, 37 nt, Artificial Sequence
  Description of Artificial Sequence:  Enzymatic Nucleic acid
caugacaggccgaaaggcgagugaggucuaagacagg

SEQ ID NO: 6438 - RNA, 37 nt, Artificial Sequence
  Description of Artificial Sequence:  Enzymatic Nucleic acid
uuucaugagccgaaaggcgagugaggucuagcaagac

SEQ ID NO: 6439 - RNA, 37 nt, Artificial Sequence
  Description of Artificial Sequence:  Enzymatic Nucleic acid
cucucuuggccgaaaggcgagugaggucuugauuuca

SEQ ID NO: 6440 - RNA, 37 nt, Artificial Sequence
  Description of Artificial Sequence:  Enzymatic Nucleic acid
aauguggggccgaaaggcgagugaggucuuggaaucc

SEQ ID NO: 6441 - RNA, 37 nt, Artificial Sequence
  Description of Artificial Sequence:  Enzymatic Nucleic acid
uccaaauggccgaaaggcgagugaggucuugaugaau

SEQ ID NO: 6442 - RNA, 37 nt, Artificial Sequence
  Description of Artificial Sequence:  Enzymatic Nucleic acid
gcuguggggccgaaaggcgagugaggucuuauugguc

SEQ ID NO: 6443 - RNA, 37 nt, Artificial Sequence
  Description of Artificial Sequence:  Enzymatic Nucleic acid
auucucaggccgaaaggcgagugaggucuugugggcu

SEQ ID NO: 6444 - RNA, 37 nt, Artificial Sequence
  Description of Artificial Sequence:  Enzymatic Nucleic acid
guauuccagccgaaaggcgagugaggucuauucucag

SEQ ID NO: 6445 - RNA, 37 nt, Artificial Sequence
  Description of Artificial Sequence:  Enzymatic Nucleic acid
aacaaaaggccgaaaggcgagugaggucugguguuau

SEQ ID NO: 6446 - RNA, 37 nt, Artificial Sequence
  Description of Artificial Sequence:  Enzymatic Nucleic acid
ugcgagaagccgaaaggcgagugaggucuaaaagcgg

SEQ ID NO: 6447 - RNA, 37 nt, Artificial Sequence
  Description of Artificial Sequence:  Enzymatic Nucleic acid
cguuuuuggccgaaaggcgagugaggucugagaacaa

SEQ ID NO: 6448 - RNA, 37 nt, Artificial Sequence
  Description of Artificial Sequence:  Enzymatic Nucleic acid
aggagauagccgaaaggcgagugaggucuguuuuugc

SEQ ID NO: 6449 - RNA, 37 nt, Artificial Sequence
  Description of Artificial Sequence:  Enzymatic Nucleic acid
caucugaggccgaaaggcgagugaggucucucaaauu

SEQ ID NO: 6450 - RNA, 37 nt, Artificial Sequence
  Description of Artificial Sequence:  Enzymatic Nucleic acid
accugauggccgaaaggcgagugaggucuauuucauc

SEQ ID NO: 6451 - RNA, 37 nt, Artificial Sequence
  Description of Artificial Sequence:  Enzymatic Nucleic acid
ccaaaggagccgaaaggcgagugaggucucugaugca

SEQ ID NO: 6452 - RNA, 37 nt, Artificial Sequence
  Description of Artificial Sequence:  Enzymatic Nucleic acid
gaucuauggccgaaaggcgagugaggucucccaaagg

SEQ ID NO: 6453 - RNA, 37 nt, Artificial Sequence
  Description of Artificial Sequence:  Enzymatic Nucleic acid
cagagcaggccgaaaggcgagugaggucuuucauuuu

SEQ ID NO: 6454 - RNA, 37 nt, Artificial Sequence
  Description of Artificial Sequence:  Enzymatic Nucleic acid
uuucagaggccgaaaggcgagugaggucuagcuucau

SEQ ID NO: 6455 - RNA, 37 nt, Artificial Sequence
  Description of Artificial Sequence:  Enzymatic Nucleic acid
ggugaugggccgaaaggcgagugaggucuuaaaggag

SEQ ID NO: 6456 - RNA, 37 nt, Artificial Sequence
  Description of Artificial Sequence:  Enzymatic Nucleic acid
aacacaaagccgaaaggcgagugaggucuuaauuuug

SEQ ID NO: 6457 - RNA, 37 nt, Artificial Sequence
  Description of Artificial Sequence:  Enzymatic Nucleic acid
aaguaacagccgaaaggcgagugaggucuaaacuaau

SEQ ID NO: 6458 - RNA, 37 nt, Artificial Sequence
  Description of Artificial Sequence:  Enzymatic Nucleic acid
auaaguaagccgaaaggcgagugaggucuacaaacua

SEQ ID NO: 6459 - RNA, 37 nt, Artificial Sequence
  Description of Artificial Sequence:  Enzymatic Nucleic acid
ggagaaaagccgaaaggcgagugaggucuuaucuucc

SEQ ID NO: 6460 - RNA, 37 nt, Artificial Sequence
  Description of Artificial Sequence:  Enzymatic Nucleic acid
guaaaaaggccgaaaggcgagugaggucuuuuugaag

SEQ ID NO: 6461 - RNA, 37 nt, Artificial Sequence
  Description of Artificial Sequence:  Enzymatic Nucleic acid
aacauauagccgaaaggcgagugaggucuucuuugag

SEQ ID NO: 6462 - RNA, 37 nt, Artificial Sequence
  Description of Artificial Sequence:  Enzymatic Nucleic acid
ggagggaagccgaaaggcgagugaggucuauauacuc

SEQ ID NO: 6463 - RNA, 37 nt, Artificial Sequence
  Description of Artificial Sequence:  Enzymatic Nucleic acid
gcagcugagccgaaaggcgagugaggucucuggaggg

SEQ ID NO: 6464 - RNA, 37 nt, Artificial Sequence
  Description of Artificial Sequence:  Enzymatic Nucleic acid
gggggcaggccgaaaggcgagugaggucuugaccugg

SEQ ID NO: 6465 - RNA, 37 nt, Artificial Sequence
  Description of Artificial Sequence:  Enzymatic Nucleic acid
uuuggggggccgaaaggcgagugaggucuagcugacc

SEQ ID NO: 6466 - RNA, 37 nt, Artificial Sequence
  Description of Artificial Sequence:  Enzymatic Nucleic acid
ugacaaaggccgaaaggcgagugaggucuguaaggag

SEQ ID NO: 6467 - RNA, 37 nt, Artificial Sequence
  Description of Artificial Sequence:  Enzymatic Nucleic acid
uugugugagccgaaaggcgagugaggucuaaagcgua

SEQ ID NO: 6468 - RNA, 37 nt, Artificial Sequence
  Description of Artificial Sequence:  Enzymatic Nucleic acid
cagagacagccgaaaggcgagugaggucuuuuuugug

SEQ ID NO: 6469 - RNA, 37 nt, Artificial Sequence
  Description of Artificial Sequence:  Enzymatic Nucleic acid
ggcagagagccgaaaggcgagugaggucuacuuuuug

SEQ ID NO: 6470 - RNA, 37 nt, Artificial Sequence
  Description of Artificial Sequence:  Enzymatic Nucleic acid
acucaagggccgaaaggcgagugaggucuagagacac

SEQ ID NO: 6471 - RNA, 37 nt, Artificial Sequence
  Description of Artificial Sequence:  Enzymatic Nucleic acid
auagaugagccgaaaggcgagugaggucuucaaggca

SEQ ID NO: 6472 - RNA, 37 nt, Artificial Sequence
  Description of Artificial Sequence:  Enzymatic Nucleic acid
uguaaguggccgaaaggcgagugaggucuuugaauag

SEQ ID NO: 6473 - RNA, 37 nt, Artificial Sequence
  Description of Artificial Sequence:  Enzymatic Nucleic acid
ggccagaggccgaaaggcgagugaggucuuguaagug

SEQ ID NO: 6474 - RNA, 37 nt, Artificial Sequence
  Description of Artificial Sequence:  Enzymatic Nucleic acid
uguugugggccgaaaggcgagugaggucucagagcug

SEQ ID NO: 6475 - RNA, 37 nt, Artificial Sequence
  Description of Artificial Sequence:  Enzymatic Nucleic acid
guaaaauggccgaaaggcgagugaggucuccuguugu

SEQ ID NO: 6476 - RNA, 37 nt, Artificial Sequence
  Description of Artificial Sequence:  Enzymatic Nucleic acid
cauucgcagccgaaaggcgagugaggucucuguaaaa

SEQ ID NO: 6477 - RNA, 37 nt, Artificial Sequence
  Description of Artificial Sequence:  Enzymatic Nucleic acid
gucauucggccgaaaggcgagugaggucuaccuguaa

SEQ ID NO: 6478 - RNA, 37 nt, Artificial Sequence
  Description of Artificial Sequence:  Enzymatic Nucleic acid
uaaugcuagccgaaaggcgagugaggucuugucauuc

SEQ ID NO: 6479 - RNA, 37 nt, Artificial Sequence
  Description of Artificial Sequence:  Enzymatic Nucleic acid
ucauaauggccgaaaggcgagugaggucuuacuguca

SEQ ID NO: 6480 - RNA, 37 nt, Artificial Sequence
  Description of Artificial Sequence:  Enzymatic Nucleic acid
ucacacuagccgaaaggcgagugaggucuucauaaug

SEQ ID NO: 6481 - RNA, 37 nt, Artificial Sequence
  Description of Artificial Sequence:  Enzymatic Nucleic acid
aauucacagccgaaaggcgagugaggucuuacucaua

SEQ ID NO: 6482 - RNA, 37 nt, Artificial Sequence
  Description of Artificial Sequence:  Enzymatic Nucleic acid
ugaauucagccgaaaggcgagugaggucuacuacuca

SEQ ID NO: 6483 - RNA, 37 nt, Artificial Sequence
  Description of Artificial Sequence:  Enzymatic Nucleic acid
auuuacuagccgaaaggcgagugaggucucugaauuc

SEQ ID NO: 6484 - RNA, 37 nt, Artificial Sequence
  Description of Artificial Sequence:  Enzymatic Nucleic acid
cauauuuagccgaaaggcgagugaggucuuaccugaa

SEQ ID NO: 6485 - RNA, 37 nt, Artificial Sequence
  Description of Artificial Sequence:  Enzymatic Nucleic acid
auuucaaagccgaaaggcgagugaggucuccuaguuu

SEQ ID NO: 6486 - RNA, 37 nt, Artificial Sequence
  Description of Artificial Sequence:  Enzymatic Nucleic acid
ugugaaaggccgaaaggcgagugaggucuauuaucaa

SEQ ID NO: 6487 - RNA, 37 nt, Artificial Sequence
  Description of Artificial Sequence:  Enzymatic Nucleic acid
aacaucuggccgaaaggcgagugaggucuaaauguug

SEQ ID NO: 6488 - RNA, 37 nt, Artificial Sequence
  Description of Artificial Sequence:  Enzymatic Nucleic acid
uucuaaaagccgaaaggcgagugaggucuaucugcaa

SEQ ID NO: 6489 - RNA, 37 nt, Artificial Sequence
  Description of Artificial Sequence:  Enzymatic Nucleic acid
ggaaggaagccgaaaggcgagugaggucuuuuuuucc

SEQ ID NO: 6490 - RNA, 37 nt, Artificial Sequence
  Description of Artificial Sequence:  Enzymatic Nucleic acid
cuaacuaggccgaaaggcgagugaggucuugaaucuu

SEQ ID NO: 6491 - RNA, 37 nt, Artificial Sequence
  Description of Artificial Sequence:  Enzymatic Nucleic acid
gcuccuaagccgaaaggcgagugaggucuuagcugaa

SEQ ID NO: 6492 - RNA, 37 nt, Artificial Sequence
  Description of Artificial Sequence:  Enzymatic Nucleic acid
aaaauggggccgaaaggcgagugaggucuuccuaacu

SEQ ID NO: 6493 - RNA, 37 nt, Artificial Sequence
  Description of Artificial Sequence:  Enzymatic Nucleic acid
ggcacacagccgaaaggcgagugaggucuagauuagg

SEQ ID NO: 6494 - RNA, 37 nt, Artificial Sequence
  Description of Artificial Sequence:  Enzymatic Nucleic acid
agggcacagccgaaaggcgagugaggucuacagauua

SEQ ID NO: 6495 - RNA, 37 nt, Artificial Sequence
  Description of Artificial Sequence:  Enzymatic Nucleic acid
acagggcagccgaaaggcgagugaggucuacacagau

SEQ ID NO: 6496 - RNA, 37 nt, Artificial Sequence
  Description of Artificial Sequence:  Enzymatic Nucleic acid
uuacaggggccgaaaggcgagugaggucuacacacag

SEQ ID NO: 6497 - RNA, 37 nt, Artificial Sequence
  Description of Artificial Sequence:  Enzymatic Nucleic acid
ucagguuagccgaaaggcgagugaggucuagggcaca

SEQ ID NO: 6498 - RNA, 37 nt, Artificial Sequence
  Description of Artificial Sequence:  Enzymatic Nucleic acid
gcuguuaagccgaaaggcgagugaggucucagucagg

SEQ ID NO: 6499 - RNA, 37 nt, Artificial Sequence
  Description of Artificial Sequence:  Enzymatic Nucleic acid
aaggacuggccgaaaggcgagugaggucuuguuaacc

SEQ ID NO: 6500 - RNA, 37 nt, Artificial Sequence
  Description of Artificial Sequence:  Enzymatic Nucleic acid
acaaaggagccgaaaggcgagugaggucuugcuguua

SEQ ID NO: 6501 - RNA, 37 nt, Artificial Sequence
  Description of Artificial Sequence:  Enzymatic Nucleic acid
acuguuuagccgaaaggcgagugaggucuaaaggacu

SEQ ID NO: 6502 - RNA, 37 nt, Artificial Sequence
  Description of Artificial Sequence:  Enzymatic Nucleic acid
uuaaaacagccgaaaggcgagugaggucuuguuuaca

SEQ ID NO: 6503 - RNA, 37 nt, Artificial Sequence
  Description of Artificial Sequence:  Enzymatic Nucleic acid
guuuaaaagccgaaaggcgagugaggucuacuguuua

SEQ ID NO: 6504 - RNA, 37 nt, Artificial Sequence
  Description of Artificial Sequence:  Enzymatic Nucleic acid
gauauugagccgaaaggcgagugaggucuuaggagag

SEQ ID NO: 6505 - RNA, 37 nt, Artificial Sequence
  Description of Artificial Sequence:  Enzymatic Nucleic acid
uuucugaagccgaaaggcgagugaggucucauuucuu

SEQ ID NO: 6506 - RNA, 37 nt, Artificial Sequence
  Description of Artificial Sequence:  Enzymatic Nucleic acid
acuguagggccgaaaggcgagugaggucuugaaaaua

SEQ ID NO: 6507 - RNA, 37 nt, Artificial Sequence
  Description of Artificial Sequence:  Enzymatic Nucleic acid
gaacauaagccgaaaggcgagugaggucuuguaggcu

SEQ ID NO: 6508 - RNA, 37 nt, Artificial Sequence
  Description of Artificial Sequence:  Enzymatic Nucleic acid
ugacugaagccgaaaggcgagugaggucuauaacugu

SEQ ID NO: 6509 - RNA, 37 nt, Artificial Sequence
  Description of Artificial Sequence:  Enzymatic Nucleic acid
gugugugagccgaaaggcgagugaggucuugaacaua

SEQ ID NO: 6510 - RNA, 37 nt, Artificial Sequence
  Description of Artificial Sequence:  Enzymatic Nucleic acid
aaaaggaagccgaaaggcgagugaggucuauuuugua

SEQ ID NO: 6511 - RNA, 37 nt, Artificial Sequence
  Description of Artificial Sequence:  Enzymatic Nucleic acid
uuuaaaaggccgaaaggcgagugaggucuaaaaggaa

SEQ ID NO: 6512 - RNA, 37 nt, Artificial Sequence
  Description of Artificial Sequence:  Enzymatic Nucleic acid
aaaaauuagccgaaaggcgagugaggucuuuuaaaag

SEQ ID NO: 6513 - RNA, 37 nt, Artificial Sequence
  Description of Artificial Sequence:  Enzymatic Nucleic acid
ggcucugagccgaaaggcgagugaggucuugaucugg

SEQ ID NO: 6514 - RNA, 37 nt, Artificial Sequence
  Description of Artificial Sequence:  Enzymatic Nucleic acid
uguagggggccgaaaggcgagugaggucuucugacug

SEQ ID NO: 6515 - RNA, 37 nt, Artificial Sequence
  Description of Artificial Sequence:  Enzymatic Nucleic acid
uaacaauggccgaaaggcgagugaggucuuguagggg

SEQ ID NO: 6516 - RNA, 37 nt, Artificial Sequence
  Description of Artificial Sequence:  Enzymatic Nucleic acid
uuucuuaagccgaaaggcgagugaggucuaaugcugu

SEQ ID NO: 6517 - RNA, 37 nt, Artificial Sequence
  Description of Artificial Sequence:  Enzymatic Nucleic acid
aucaaauagccgaaaggcgagugaggucuuuucuuaa

SEQ ID NO: 6518 - RNA, 37 nt, Artificial Sequence
  Description of Artificial Sequence:  Enzymatic Nucleic acid
cauugagagccgaaaggcgagugaggucuaaaaauca

SEQ ID NO: 6519 - DNA, 31 bp, Artificial Sequence
  Description of Artificial Sequence:  Enzymatic Nucleic acid
ctccggcgggctagctacaacgaagcgcggc

SEQ ID NO: 6520 - DNA, 31 bp, Artificial Sequence
  Description of Artificial Sequence:  Enzymatic Nucleic acid
gactccggggctagctacaacgagcagcgcg

SEQ ID NO: 6521 - DNA, 31 bp, Artificial Sequence
  Description of Artificial Sequence:  Enzymatic Nucleic acid
gctcgggaggctagctacaacgatccggcgc

SEQ ID NO: 6522 - DNA, 31 bp, Artificial Sequence
  Description of Artificial Sequence:  Enzymatic Nucleic acid
ggggctagggctagctacaacgatcgggact

SEQ ID NO: 6523 - DNA, 31 bp, Artificial Sequence
  Description of Artificial Sequence:  Enzymatic Nucleic acid
cgccggggggctagctacaacgatagctcgg

SEQ ID NO: 6524 - DNA, 31 bp, Artificial Sequence
  Description of Artificial Sequence:  Enzymatic Nucleic acid
cggcggcgggctagctacaacgacggggcta

SEQ ID NO: 6525 - DNA, 31 bp, Artificial Sequence
  Description of Artificial Sequence:  Enzymatic Nucleic acid
ggcggcggggctagctacaacgagccggggc

SEQ ID NO: 6526 - DNA, 31 bp, Artificial Sequence
  Description of Artificial Sequence:  Enzymatic Nucleic acid
ggcggcggggctagctacaacgaggcgccgg

SEQ ID NO: 6527 - DNA, 31 bp, Artificial Sequence
  Description of Artificial Sequence:  Enzymatic Nucleic acid
ctgggcggggctagctacaacgaggcggcgc

SEQ ID NO: 6528 - DNA, 31 bp, Artificial Sequence
  Description of Artificial Sequence:  Enzymatic Nucleic acid
ggtctgggggctagctacaacgaggcggcgg

SEQ ID NO: 6529 - DNA, 31 bp, Artificial Sequence
  Description of Artificial Sequence:  Enzymatic Nucleic acid
tcgtccggggctagctacaacgactgggcgg

SEQ ID NO: 6530 - DNA, 31 bp, Artificial Sequence
  Description of Artificial Sequence:  Enzymatic Nucleic acid
gcctgtcgggctagctacaacgaccggtctg

SEQ ID NO: 6531 - DNA, 31 bp, Artificial Sequence
  Description of Artificial Sequence:  Enzymatic Nucleic acid
gtggcctgggctagctacaacgacgtccggt

SEQ ID NO: 6532 - DNA, 31 bp, Artificial Sequence
  Description of Artificial Sequence:  Enzymatic Nucleic acid
cgaggtggggctagctacaacgactgtcgtc

SEQ ID NO: 6533 - DNA, 31 bp, Artificial Sequence
  Description of Artificial Sequence:  Enzymatic Nucleic acid
cgacgaggggctagctacaacgaggcctgtc

SEQ ID NO: 6534 - DNA, 31 bp, Artificial Sequence
  Description of Artificial Sequence:  Enzymatic Nucleic acid
gacgccgaggctagctacaacgagaggtggc

SEQ ID NO: 6535 - DNA, 31 bp, Artificial Sequence
  Description of Artificial Sequence:  Enzymatic Nucleic acid
ggcggacgggctagctacaacgacgacgagg

SEQ ID NO: 6536 - DNA, 31 bp, Artificial Sequence
  Description of Artificial Sequence:  Enzymatic Nucleic acid
cgggcggaggctagctacaacgagccgacga

SEQ ID NO: 6537 - DNA, 31 bp, Artificial Sequence
  Description of Artificial Sequence:  Enzymatic Nucleic acid
gactcgggggctagctacaacgaggacgccg

SEQ ID NO: 6538 - DNA, 31 bp, Artificial Sequence
  Description of Artificial Sequence:  Enzymatic Nucleic acid
ggcggggaggctagctacaacgatcgggcgg

SEQ ID NO: 6539 - DNA, 31 bp, Artificial Sequence
  Description of Artificial Sequence:  Enzymatic Nucleic acid
cggcgaggggctagctacaacgaggggactc

SEQ ID NO: 6540 - DNA, 31 bp, Artificial Sequence
  Description of Artificial Sequence:  Enzymatic Nucleic acid
gttggcggggctagctacaacgagaggcggg

SEQ ID NO: 6541 - DNA, 31 bp, Artificial Sequence
  Description of Artificial Sequence:  Enzymatic Nucleic acid
ggcgttggggctagctacaacgaggcgaggc

SEQ ID NO: 6542 - DNA, 31 bp, Artificial Sequence
  Description of Artificial Sequence:  Enzymatic Nucleic acid
ttgtggcgggctagctacaacgatggcggcg

SEQ ID NO: 6543 - DNA, 31 bp, Artificial Sequence
  Description of Artificial Sequence:  Enzymatic Nucleic acid
ggttgtggggctagctacaacgagttggcgg

SEQ ID NO: 6544 - DNA, 31 bp, Artificial Sequence
  Description of Artificial Sequence:  Enzymatic Nucleic acid
ggtggttgggctagctacaacgaggcgttgg

SEQ ID NO: 6545 - DNA, 31 bp, Artificial Sequence
  Description of Artificial Sequence:  Enzymatic Nucleic acid
cgcggtggggctagctacaacgatgtggcgt

SEQ ID NO: 6546 - DNA, 31 bp, Artificial Sequence
  Description of Artificial Sequence:  Enzymatic Nucleic acid
gtgcgcggggctagctacaacgaggttgtgg

SEQ ID NO: 6547 - DNA, 31 bp, Artificial Sequence
  Description of Artificial Sequence:  Enzymatic Nucleic acid
gccgtgcgggctagctacaacgaggtggttg

SEQ ID NO: 6548 - DNA, 31 bp, Artificial Sequence
  Description of Artificial Sequence:  Enzymatic Nucleic acid
gggccgtgggctagctacaacgagcggtggt

SEQ ID NO: 6549 - DNA, 31 bp, Artificial Sequence
  Description of Artificial Sequence:  Enzymatic Nucleic acid
gggggccgggctagctacaacgagcgcggtg

SEQ ID NO: 6550 - DNA, 31 bp, Artificial Sequence
  Description of Artificial Sequence:  Enzymatic Nucleic acid
tcagggggggctagctacaacgacgtgcgcg

SEQ ID NO: 6551 - DNA, 31 bp, Artificial Sequence
  Description of Artificial Sequence:  Enzymatic Nucleic acid
ggacggagggctagctacaacgacagggggc

SEQ ID NO: 6552 - DNA, 31 bp, Artificial Sequence
  Description of Artificial Sequence:  Enzymatic Nucleic acid
atactggaggctagctacaacgaggagtcag

SEQ ID NO: 6553 - DNA, 31 bp, Artificial Sequence
  Description of Artificial Sequence:  Enzymatic Nucleic acid
gatcaataggctagctacaacgatggacgga

SEQ ID NO: 6554 - DNA, 31 bp, Artificial Sequence
  Description of Artificial Sequence:  Enzymatic Nucleic acid
ccgatcaaggctagctacaacgaactggacg

SEQ ID NO: 6555 - DNA, 31 bp, Artificial Sequence
  Description of Artificial Sequence:  Enzymatic Nucleic acid
tctcccgaggctagctacaacgacaatactg

SEQ ID NO: 6556 - DNA, 31 bp, Artificial Sequence
  Description of Artificial Sequence:  Enzymatic Nucleic acid
cgctccggggctagctacaacgatctcccga

SEQ ID NO: 6557 - DNA, 31 bp, Artificial Sequence
  Description of Artificial Sequence:  Enzymatic Nucleic acid
agagctcgggctagctacaacgatccggctc

SEQ ID NO: 6558 - DNA, 31 bp, Artificial Sequence
  Description of Artificial Sequence:  Enzymatic Nucleic acid
ccgaagagggctagctacaacgatcgctccg

SEQ ID NO: 6559 - DNA, 31 bp, Artificial Sequence
  Description of Artificial Sequence:  Enzymatic Nucleic acid
catcgctgggctagctacaacgatccccgaa

SEQ ID NO: 6560 - DNA, 31 bp, Artificial Sequence
  Description of Artificial Sequence:  Enzymatic Nucleic acid
tcgcatcgggctagctacaacgatgctcccc

SEQ ID NO: 6561 - DNA, 31 bp, Artificial Sequence
  Description of Artificial Sequence:  Enzymatic Nucleic acid
gggtcgcaggctagctacaacgacgctgctc

SEQ ID NO: 6562 - DNA, 31 bp, Artificial Sequence
  Description of Artificial Sequence:  Enzymatic Nucleic acid
gagggtcgggctagctacaacgaatcgctgc

SEQ ID NO: 6563 - DNA, 31 bp, Artificial Sequence
  Description of Artificial Sequence:  Enzymatic Nucleic acid
ccggagggggctagctacaacgacgcatcgc

SEQ ID NO: 6564 - DNA, 31 bp, Artificial Sequence
  Description of Artificial Sequence:  Enzymatic Nucleic acid
cccggccgggctagctacaacgacccggagg

SEQ ID NO: 6565 - DNA, 31 bp, Artificial Sequence
  Description of Artificial Sequence:  Enzymatic Nucleic acid
tgccccggggctagctacaacgacgtcccgg

SEQ ID NO: 6566 - DNA, 31 bp, Artificial Sequence
  Description of Artificial Sequence:  Enzymatic Nucleic acid
gagcgctgggctagctacaacgacccggccg

SEQ ID NO: 6567 - DNA, 31 bp, Artificial Sequence
  Description of Artificial Sequence:  Enzymatic Nucleic acid
caggagcgggctagctacaacgatgccccgg

SEQ ID NO: 6568 - DNA, 31 bp, Artificial Sequence
  Description of Artificial Sequence:  Enzymatic Nucleic acid
gccaggagggctagctacaacgagctgcccc

SEQ ID NO: 6569 - DNA, 31 bp, Artificial Sequence
  Description of Artificial Sequence:  Enzymatic Nucleic acid
cagcagcgggctagctacaacgacaggagcg

SEQ ID NO: 6570 - DNA, 31 bp, Artificial Sequence
  Description of Artificial Sequence:  Enzymatic Nucleic acid
gccagcagggctagctacaacgagccaggag

SEQ ID NO: 6571 - DNA, 31 bp, Artificial Sequence
  Description of Artificial Sequence:  Enzymatic Nucleic acid
gcagccagggctagctacaacgaagcgccag

SEQ ID NO: 6572 - DNA, 31 bp, Artificial Sequence
  Description of Artificial Sequence:  Enzymatic Nucleic acid
gagcgcagggctagctacaacgacagcagcg

SEQ ID NO: 6573 - DNA, 31 bp, Artificial Sequence
  Description of Artificial Sequence:  Enzymatic Nucleic acid
gcagagcgggctagctacaacgaagccagca

SEQ ID NO: 6574 - DNA, 31 bp, Artificial Sequence
  Description of Artificial Sequence:  Enzymatic Nucleic acid
gggcagagggctagctacaacgagcagccag

SEQ ID NO: 6575 - DNA, 31 bp, Artificial Sequence
  Description of Artificial Sequence:  Enzymatic Nucleic acid
tcgccgggggctagctacaacgaagagcgca

SEQ ID NO: 6576 - DNA, 31 bp, Artificial Sequence
  Description of Artificial Sequence:  Enzymatic Nucleic acid
ccgactcgggctagctacaacgacgggcaga

SEQ ID NO: 6577 - DNA, 31 bp, Artificial Sequence
  Description of Artificial Sequence:  Enzymatic Nucleic acid
gagcccgaggctagctacaacgatcgccggg

SEQ ID NO: 6578 - DNA, 31 bp, Artificial Sequence
  Description of Artificial Sequence:  Enzymatic Nucleic acid
ctccagagggctagctacaacgaccgactcg

SEQ ID NO: 6579 - DNA, 31 bp, Artificial Sequence
  Description of Artificial Sequence:  Enzymatic Nucleic acid
ttggcaaaggctagctacaacgatttctttt

SEQ ID NO: 6580 - DNA, 31 bp, Artificial Sequence
  Description of Artificial Sequence:  Enzymatic Nucleic acid
tgccttggggctagctacaacgaaaactttc

SEQ ID NO: 6581 - DNA, 31 bp, Artificial Sequence
  Description of Artificial Sequence:  Enzymatic Nucleic acid
tactcgtgggctagctacaacgacttggcaa

SEQ ID NO: 6582 - DNA, 31 bp, Artificial Sequence
  Description of Artificial Sequence:  Enzymatic Nucleic acid
gttactcgggctagctacaacgagccttggc

SEQ ID NO: 6583 - DNA, 31 bp, Artificial Sequence
  Description of Artificial Sequence:  Enzymatic Nucleic acid
gcttgttaggctagctacaacgatcgtgcct

SEQ ID NO: 6584 - DNA, 31 bp, Artificial Sequence
  Description of Artificial Sequence:  Enzymatic Nucleic acid
tgagcttgggctagctacaacgatactcgtg

SEQ ID NO: 6585 - DNA, 31 bp, Artificial Sequence
  Description of Artificial Sequence:  Enzymatic Nucleic acid
tgcgtgagggctagctacaacgattgttact

SEQ ID NO: 6586 - DNA, 31 bp, Artificial Sequence
  Description of Artificial Sequence:  Enzymatic Nucleic acid
caactgcgggctagctacaacgagagcttgt

SEQ ID NO: 6587 - DNA, 31 bp, Artificial Sequence
  Description of Artificial Sequence:  Enzymatic Nucleic acid
cccaactgggctagctacaacgagtgagctt

SEQ ID NO: 6588 - DNA, 31 bp, Artificial Sequence
  Description of Artificial Sequence:  Enzymatic Nucleic acid
gtgcccaaggctagctacaacgatgcgtgag

SEQ ID NO: 6589 - DNA, 31 bp, Artificial Sequence
  Description of Artificial Sequence:  Enzymatic Nucleic acid
caaaagtgggctagctacaacgaccaactgc

SEQ ID NO: 6590 - DNA, 31 bp, Artificial Sequence
  Description of Artificial Sequence:  Enzymatic Nucleic acid
ttcaaaagggctagctacaacgagcccaact

SEQ ID NO: 6591 - DNA, 31 bp, Artificial Sequence
  Description of Artificial Sequence:  Enzymatic Nucleic acid
gaaaatgaggctagctacaacgacttcaaaa

SEQ ID NO: 6592 - DNA, 31 bp, Artificial Sequence
  Description of Artificial Sequence:  Enzymatic Nucleic acid
tgagaaaaggctagctacaacgagatcttca

SEQ ID NO: 6593 - DNA, 31 bp, Artificial Sequence
  Description of Artificial Sequence:  Enzymatic Nucleic acid
tctggaggggctagctacaacgatgagaaaa

SEQ ID NO: 6594 - DNA, 31 bp, Artificial Sequence
  Description of Artificial Sequence:  Enzymatic Nucleic acid
attgaacaggctagctacaacgacctctgga

SEQ ID NO: 6595 - DNA, 31 bp, Artificial Sequence
  Description of Artificial Sequence:  Enzymatic Nucleic acid
ttattgaaggctagctacaacgaatcctctg

SEQ ID NO: 6596 - DNA, 31 bp, Artificial Sequence
  Description of Artificial Sequence:  Enzymatic Nucleic acid
cacagttaggctagctacaacgatgaacatc

SEQ ID NO: 6597 - DNA, 31 bp, Artificial Sequence
  Description of Artificial Sequence:  Enzymatic Nucleic acid
cctcacagggctagctacaacgatattgaac

SEQ ID NO: 6598 - DNA, 31 bp, Artificial Sequence
  Description of Artificial Sequence:  Enzymatic Nucleic acid
ccacctcaggctagctacaacgaagttattg

SEQ ID NO: 6599 - DNA, 31 bp, Artificial Sequence
  Description of Artificial Sequence:  Enzymatic Nucleic acid
aaggaccaggctagctacaacgactcacagt

SEQ ID NO: 6600 - DNA, 31 bp, Artificial Sequence
  Description of Artificial Sequence:  Enzymatic Nucleic acid
cccaaggaggctagctacaacgacacctcac

SEQ ID NO: 6601 - DNA, 31 bp, Artificial Sequence
  Description of Artificial Sequence:  Enzymatic Nucleic acid
tttccaaaggctagctacaacgatcccaagg

SEQ ID NO: 6602 - DNA, 31 bp, Artificial Sequence
  Description of Artificial Sequence:  Enzymatic Nucleic acid
ataggtaaggctagctacaacgattccaaat

SEQ ID NO: 6603 - DNA, 31 bp, Artificial Sequence
  Description of Artificial Sequence:  Enzymatic Nucleic acid
cacataggggctagctacaacgaaatttcca

SEQ ID NO: 6604 - DNA, 31 bp, Artificial Sequence
  Description of Artificial Sequence:  Enzymatic Nucleic acid
tctgcacaggctagctacaacgaaggtaatt

SEQ ID NO: 6605 - DNA, 31 bp, Artificial Sequence
  Description of Artificial Sequence:  Enzymatic Nucleic acid
cctctgcaggctagctacaacgaataggtaa

SEQ ID NO: 6606 - DNA, 31 bp, Artificial Sequence
  Description of Artificial Sequence:  Enzymatic Nucleic acid
ttcctctgggctagctacaacgaacataggt

SEQ ID NO: 6607 - DNA, 31 bp, Artificial Sequence
  Description of Artificial Sequence:  Enzymatic Nucleic acid
gatcataaggctagctacaacgatcctctgc

SEQ ID NO: 6608 - DNA, 31 bp, Artificial Sequence
  Description of Artificial Sequence:  Enzymatic Nucleic acid
aaagatcaggctagctacaacgaaattcctc

SEQ ID NO: 6609 - DNA, 31 bp, Artificial Sequence
  Description of Artificial Sequence:  Enzymatic Nucleic acid
aggaaagaggctagctacaacgacataattc

SEQ ID NO: 6610 - DNA, 31 bp, Artificial Sequence
  Description of Artificial Sequence:  Enzymatic Nucleic acid
ctggatggggctagctacaacgactttaaga

SEQ ID NO: 6611 - DNA, 31 bp, Artificial Sequence
  Description of Artificial Sequence:  Enzymatic Nucleic acid
ctcctggaggctagctacaacgaggtcttta

SEQ ID NO: 6612 - DNA, 31 bp, Artificial Sequence
  Description of Artificial Sequence:  Enzymatic Nucleic acid
accagccaggctagctacaacgactcctgga

SEQ ID NO: 6613 - DNA, 31 bp, Artificial Sequence
  Description of Artificial Sequence:  Enzymatic Nucleic acid
ataaccagggctagctacaacgacacctcct

SEQ ID NO: 6614 - DNA, 31 bp, Artificial Sequence
  Description of Artificial Sequence:  Enzymatic Nucleic acid
ggacataaggctagctacaacgacagccacc

SEQ ID NO: 6615 - DNA, 31 bp, Artificial Sequence
  Description of Artificial Sequence:  Enzymatic Nucleic acid
tgaggacaggctagctacaacgaaaccagcc

SEQ ID NO: 6616 - DNA, 31 bp, Artificial Sequence
  Description of Artificial Sequence:  Enzymatic Nucleic acid
aatgaggaggctagctacaacgaataaccag

SEQ ID NO: 6617 - DNA, 31 bp, Artificial Sequence
  Description of Artificial Sequence:  Enzymatic Nucleic acid
gagggcaaggctagctacaacgagaggacat

SEQ ID NO: 6618 - DNA, 31 bp, Artificial Sequence
  Description of Artificial Sequence:  Enzymatic Nucleic acid
gttgagggggctagctacaacgaaatgagga

SEQ ID NO: 6619 - DNA, 31 bp, Artificial Sequence
  Description of Artificial Sequence:  Enzymatic Nucleic acid
ccactgtgggctagctacaacgatgagggca

SEQ ID NO: 6620 - DNA, 31 bp, Artificial Sequence
  Description of Artificial Sequence:  Enzymatic Nucleic acid
ctccactgggctagctacaacgagttgaggg

SEQ ID NO: 6621 - DNA, 31 bp, Artificial Sequence
  Description of Artificial Sequence:  Enzymatic Nucleic acid
tcgctccaggctagctacaacgatgtgttga

SEQ ID NO: 6622 - DNA, 31 bp, Artificial Sequence
  Description of Artificial Sequence:  Enzymatic Nucleic acid
ggaattcgggctagctacaacgatccactgt

SEQ ID NO: 6623 - DNA, 31 bp, Artificial Sequence
  Description of Artificial Sequence:  Enzymatic Nucleic acid
caaaggaaggctagctacaacgatcgctcca

SEQ ID NO: 6624 - DNA, 31 bp, Artificial Sequence
  Description of Artificial Sequence:  Enzymatic Nucleic acid
tctgcaggggctagctacaacgatttccaaa

SEQ ID NO: 6625 - DNA, 31 bp, Artificial Sequence
  Description of Artificial Sequence:  Enzymatic Nucleic acid
atgatctgggctagctacaacgaaggttttc

SEQ ID NO: 6626 - DNA, 31 bp, Artificial Sequence
  Description of Artificial Sequence:  Enzymatic Nucleic acid
tctgatgaggctagctacaacgactgcaggt

SEQ ID NO: 6627 - DNA, 31 bp, Artificial Sequence
  Description of Artificial Sequence:  Enzymatic Nucleic acid
tcctctgaggctagctacaacgagatctgca

SEQ ID NO: 6628 - DNA, 31 bp, Artificial Sequence
  Description of Artificial Sequence:  Enzymatic Nucleic acid
agtacataggctagctacaacgattcctctg

SEQ ID NO: 6629 - DNA, 31 bp, Artificial Sequence
  Description of Artificial Sequence:  Enzymatic Nucleic acid
gtagtacaggctagctacaacgaatttcctc

SEQ ID NO: 6630 - DNA, 31 bp, Artificial Sequence
  Description of Artificial Sequence:  Enzymatic Nucleic acid
tcgtagtaggctagctacaacgaatatttcc

SEQ ID NO: 6631 - DNA, 31 bp, Artificial Sequence
  Description of Artificial Sequence:  Enzymatic Nucleic acid
tttcgtagggctagctacaacgaacatattt

SEQ ID NO: 6632 - DNA, 31 bp, Artificial Sequence
  Description of Artificial Sequence:  Enzymatic Nucleic acid
aattttcgggctagctacaacgaagtacata

SEQ ID NO: 6633 - DNA, 31 bp, Artificial Sequence
  Description of Artificial Sequence:  Enzymatic Nucleic acid
cataggaaggctagctacaacgatttcgtag

SEQ ID NO: 6634 - DNA, 31 bp, Artificial Sequence
  Description of Artificial Sequence:  Enzymatic Nucleic acid
ctaaggcaggctagctacaacgaaggaattt

SEQ ID NO: 6635 - DNA, 31 bp, Artificial Sequence
  Description of Artificial Sequence:  Enzymatic Nucleic acid
tgctaaggggctagctacaacgaataggaat

SEQ ID NO: 6636 - DNA, 31 bp, Artificial Sequence
  Description of Artificial Sequence:  Enzymatic Nucleic acid
taagactgggctagctacaacgataaggcat

SEQ ID NO: 6637 - DNA, 31 bp, Artificial Sequence
  Description of Artificial Sequence:  Enzymatic Nucleic acid
agataagaggctagctacaacgatgctaagg

SEQ ID NO: 6638 - DNA, 31 bp, Artificial Sequence
  Description of Artificial Sequence:  Enzymatic Nucleic acid
tagttagaggctagctacaacgaaagactgc

SEQ ID NO: 6639 - DNA, 31 bp, Artificial Sequence
  Description of Artificial Sequence:  Enzymatic Nucleic acid
catcatagggctagctacaacgatagataag

SEQ ID NO: 6640 - DNA, 31 bp, Artificial Sequence
  Description of Artificial Sequence:  Enzymatic Nucleic acid
ttgcatcaggctagctacaacgaagttagat

SEQ ID NO: 6641 - DNA, 31 bp, Artificial Sequence
  Description of Artificial Sequence:  Enzymatic Nucleic acid
tatttgcaggctagctacaacgacatagtta

SEQ ID NO: 6642 - DNA, 31 bp, Artificial Sequence
  Description of Artificial Sequence:  Enzymatic Nucleic acid
tttatttgggctagctacaacgaatcatagt

SEQ ID NO: 6643 - DNA, 31 bp, Artificial Sequence
  Description of Artificial Sequence:  Enzymatic Nucleic acid
cggttttaggctagctacaacgattgcatca

SEQ ID NO: 6644 - DNA, 31 bp, Artificial Sequence
  Description of Artificial Sequence:  Enzymatic Nucleic acid
cagtccggggctagctacaacgatttatttg

SEQ ID NO: 6645 - DNA, 31 bp, Artificial Sequence
  Description of Artificial Sequence:  Enzymatic Nucleic acid
tccttcagggctagctacaacgaccggtttt

SEQ ID NO: 6646 - DNA, 31 bp, Artificial Sequence
  Description of Artificial Sequence:  Enzymatic Nucleic acid
atgggcagggctagctacaacgatccttcag

SEQ ID NO: 6647 - DNA, 31 bp, Artificial Sequence
  Description of Artificial Sequence:  Enzymatic Nucleic acid
ctcatgggggctagctacaacgaagctcctt

SEQ ID NO: 6648 - DNA, 31 bp, Artificial Sequence
  Description of Artificial Sequence:  Enzymatic Nucleic acid
atttctcaggctagctacaacgagggcagct

SEQ ID NO: 6649 - DNA, 31 bp, Artificial Sequence
  Description of Artificial Sequence:  Enzymatic Nucleic acid
cctgtaaaggctagctacaacgattctcatg

SEQ ID NO: 6650 - DNA, 31 bp, Artificial Sequence
  Description of Artificial Sequence:  Enzymatic Nucleic acid
atttcctgggctagctacaacgaaaatttct

SEQ ID NO: 6651 - DNA, 31 bp, Artificial Sequence
  Description of Artificial Sequence:  Enzymatic Nucleic acid
atgcaggaggctagctacaacgattcctgta

SEQ ID NO: 6652 - DNA, 31 bp, Artificial Sequence
  Description of Artificial Sequence:  Enzymatic Nucleic acid
gcgccatgggctagctacaacgaaggatttc

SEQ ID NO: 6653 - DNA, 31 bp, Artificial Sequence
  Description of Artificial Sequence:  Enzymatic Nucleic acid
cggcgccaggctagctacaacgagcaggatt

SEQ ID NO: 6654 - DNA, 31 bp, Artificial Sequence
  Description of Artificial Sequence:  Enzymatic Nucleic acid
gcacggcgggctagctacaacgacatgcagg

SEQ ID NO: 6655 - DNA, 31 bp, Artificial Sequence
  Description of Artificial Sequence:  Enzymatic Nucleic acid
ccgcacggggctagctacaacgagccatgca

SEQ ID NO: 6656 - DNA, 31 bp, Artificial Sequence
  Description of Artificial Sequence:  Enzymatic Nucleic acid
gaaccgcaggctagctacaacgaggcgccat

SEQ ID NO: 6657 - DNA, 31 bp, Artificial Sequence
  Description of Artificial Sequence:  Enzymatic Nucleic acid
ctgaaccgggctagctacaacgaacggcgcc

SEQ ID NO: 6658 - DNA, 31 bp, Artificial Sequence
  Description of Artificial Sequence:  Enzymatic Nucleic acid
ttgctgaaggctagctacaacgacgcacggc

SEQ ID NO: 6659 - DNA, 31 bp, Artificial Sequence
  Description of Artificial Sequence:  Enzymatic Nucleic acid
ggttgttgggctagctacaacgatgaaccgc

SEQ ID NO: 6660 - DNA, 31 bp, Artificial Sequence
  Description of Artificial Sequence:  Enzymatic Nucleic acid
cagggttgggctagctacaacgatgctgaac

SEQ ID NO: 6661 - DNA, 31 bp, Artificial Sequence
  Description of Artificial Sequence:  Enzymatic Nucleic acid
gggcagggggctagctacaacgatgttgctg

SEQ ID NO: 6662 - DNA, 31 bp, Artificial Sequence
  Description of Artificial Sequence:  Enzymatic Nucleic acid
gcacagggggctagctacaacgaagggttgt

SEQ ID NO: 6663 - DNA, 31 bp, Artificial Sequence
  Description of Artificial Sequence:  Enzymatic Nucleic acid
acgttgcaggctagctacaacgaagggcagg

SEQ ID NO: 6664 - DNA, 31 bp, Artificial Sequence
  Description of Artificial Sequence:  Enzymatic Nucleic acid
ccacgttgggctagctacaacgaacagggca

SEQ ID NO: 6665 - DNA, 31 bp, Artificial Sequence
  Description of Artificial Sequence:  Enzymatic Nucleic acid
tctccacgggctagctacaacgatgcacagg

SEQ ID NO: 6666 - DNA, 31 bp, Artificial Sequence
  Description of Artificial Sequence:  Enzymatic Nucleic acid
gctctccaggctagctacaacgagttgcaca

SEQ ID NO: 6667 - DNA, 31 bp, Artificial Sequence
  Description of Artificial Sequence:  Enzymatic Nucleic acid
actggatgggctagctacaacgatctccacg

SEQ ID NO: 6668 - DNA, 31 bp, Artificial Sequence
  Description of Artificial Sequence:  Enzymatic Nucleic acid
ccactggaggctagctacaacgagctctcca

SEQ ID NO: 6669 - DNA, 31 bp, Artificial Sequence
  Description of Artificial Sequence:  Enzymatic Nucleic acid
tcccgccaggctagctacaacgatggatgct

SEQ ID NO: 6670 - DNA, 31 bp, Artificial Sequence
  Description of Artificial Sequence:  Enzymatic Nucleic acid
atgtcccgggctagctacaacgacactggat

SEQ ID NO: 6671 - DNA, 31 bp, Artificial Sequence
  Description of Artificial Sequence:  Enzymatic Nucleic acid
tgactatgggctagctacaacgacccgccac

SEQ ID NO: 6672 - DNA, 31 bp, Artificial Sequence
  Description of Artificial Sequence:  Enzymatic Nucleic acid
gctgactaggctagctacaacgagtcccgcc

SEQ ID NO: 6673 - DNA, 31 bp, Artificial Sequence
  Description of Artificial Sequence:  Enzymatic Nucleic acid
actgctgaggctagctacaacgatatgtccc

SEQ ID NO: 6674 - DNA, 31 bp, Artificial Sequence
  Description of Artificial Sequence:  Enzymatic Nucleic acid
agtcactgggctagctacaacgatgactatg

SEQ ID NO: 6675 - DNA, 31 bp, Artificial Sequence
  Description of Artificial Sequence:  Enzymatic Nucleic acid
gaaagtcaggctagctacaacgatgctgact

SEQ ID NO: 6676 - DNA, 31 bp, Artificial Sequence
  Description of Artificial Sequence:  Enzymatic Nucleic acid
tgagaaagggctagctacaacgacactgctg

SEQ ID NO: 6677 - DNA, 31 bp, Artificial Sequence
  Description of Artificial Sequence:  Enzymatic Nucleic acid
acatgttgggctagctacaacgatgagaaag

SEQ ID NO: 6678 - DNA, 31 bp, Artificial Sequence
  Description of Artificial Sequence:  Enzymatic Nucleic acid
tcgacatgggctagctacaacgatgctgaga

SEQ ID NO: 6679 - DNA, 31 bp, Artificial Sequence
  Description of Artificial Sequence:  Enzymatic Nucleic acid
catcgacaggctagctacaacgagttgctga

SEQ ID NO: 6680 - DNA, 31 bp, Artificial Sequence
  Description of Artificial Sequence:  Enzymatic Nucleic acid
tccatcgaggctagctacaacgaatgttgct

SEQ ID NO: 6681 - DNA, 31 bp, Artificial Sequence
  Description of Artificial Sequence:  Enzymatic Nucleic acid
gaagtccaggctagctacaacgacgacatgt

SEQ ID NO: 6682 - DNA, 31 bp, Artificial Sequence
  Description of Artificial Sequence:  Enzymatic Nucleic acid
tctggaagggctagctacaacgaccatcgac

SEQ ID NO: 6683 - DNA, 31 bp, Artificial Sequence
  Description of Artificial Sequence:  Enzymatic Nucleic acid
ccaggtggggctagctacaacgatctggaag

SEQ ID NO: 6684 - DNA, 31 bp, Artificial Sequence
  Description of Artificial Sequence:  Enzymatic Nucleic acid
tgcccaggggctagctacaacgaggttctgg

SEQ ID NO: 6685 - DNA, 31 bp, Artificial Sequence
  Description of Artificial Sequence:  Enzymatic Nucleic acid
ggcagctgggctagctacaacgaccaggtgg

SEQ ID NO: 6686 - DNA, 31 bp, Artificial Sequence
  Description of Artificial Sequence:  Enzymatic Nucleic acid
tttggcagggctagctacaacgatgcccagg

SEQ ID NO: 6687 - DNA, 31 bp, Artificial Sequence
  Description of Artificial Sequence:  Enzymatic Nucleic acid
acttttggggctagctacaacgaagctgccc

SEQ ID NO: 6688 - DNA, 31 bp, Artificial Sequence
  Description of Artificial Sequence:  Enzymatic Nucleic acid
ggatcacaggctagctacaacgattttggca

SEQ ID NO: 6689 - DNA, 31 bp, Artificial Sequence
  Description of Artificial Sequence:  Enzymatic Nucleic acid
ttggatcaggctagctacaacgaacttttgg

SEQ ID NO: 6690 - DNA, 31 bp, Artificial Sequence
  Description of Artificial Sequence:  Enzymatic Nucleic acid
agcttggaggctagctacaacgacacacttt

SEQ ID NO: 6691 - DNA, 31 bp, Artificial Sequence
  Description of Artificial Sequence:  Enzymatic Nucleic acid
tgggacagggctagctacaacgattggatca

SEQ ID NO: 6692 - DNA, 31 bp, Artificial Sequence
  Description of Artificial Sequence:  Enzymatic Nucleic acid
cattgggaggctagctacaacgaagcttgga

SEQ ID NO: 6693 - DNA, 31 bp, Artificial Sequence
  Description of Artificial Sequence:  Enzymatic Nucleic acid
agctcccaggctagctacaacgatgggacag

SEQ ID NO: 6694 - DNA, 31 bp, Artificial Sequence
  Description of Artificial Sequence:  Enzymatic Nucleic acid
cccagcagggctagctacaacgatcccattg

SEQ ID NO: 6695 - DNA, 31 bp, Artificial Sequence
  Description of Artificial Sequence:  Enzymatic Nucleic acid
caccccagggctagctacaacgaagctccca

SEQ ID NO: 6696 - DNA, 31 bp, Artificial Sequence
  Description of Artificial Sequence:  Enzymatic Nucleic acid
ctcctgcaggctagctacaacgacccagcag

SEQ ID NO: 6697 - DNA, 31 bp, Artificial Sequence
  Description of Artificial Sequence:  Enzymatic Nucleic acid
ctctcctgggctagctacaacgaaccccagc

SEQ ID NO: 6698 - DNA, 31 bp, Artificial Sequence
  Description of Artificial Sequence:  Enzymatic Nucleic acid
tctggcagggctagctacaacgatctcctct

SEQ ID NO: 6699 - DNA, 31 bp, Artificial Sequence
  Description of Artificial Sequence:  Enzymatic Nucleic acid
gtttctggggctagctacaacgaagttctcc

SEQ ID NO: 6700 - DNA, 31 bp, Artificial Sequence
  Description of Artificial Sequence:  Enzymatic Nucleic acid
ttggtcagggctagctacaacgattctggca

SEQ ID NO: 6701 - DNA, 31 bp, Artificial Sequence
  Description of Artificial Sequence:  Enzymatic Nucleic acid
gattttggggctagctacaacgacagtttct

SEQ ID NO: 6702 - DNA, 31 bp, Artificial Sequence
  Description of Artificial Sequence:  Enzymatic Nucleic acid
acagatgaggctagctacaacgatttggtca

SEQ ID NO: 6703 - DNA, 31 bp, Artificial Sequence
  Description of Artificial Sequence:  Enzymatic Nucleic acid
ggcacagaggctagctacaacgagattttgg

SEQ ID NO: 6704 - DNA, 31 bp, Artificial Sequence
  Description of Artificial Sequence:  Enzymatic Nucleic acid
gctgggcaggctagctacaacgaagatgatt

SEQ ID NO: 6705 - DNA, 31 bp, Artificial Sequence
  Description of Artificial Sequence:  Enzymatic Nucleic acid
ctgctgggggctagctacaacgaacagatga

SEQ ID NO: 6706 - DNA, 31 bp, Artificial Sequence
  Description of Artificial Sequence:  Enzymatic Nucleic acid
gagcactgggctagctacaacgatgggcaca

SEQ ID NO: 6707 - DNA, 31 bp, Artificial Sequence
  Description of Artificial Sequence:  Enzymatic Nucleic acid
ccggagcaggctagctacaacgatgctgggc

SEQ ID NO: 6708 - DNA, 31 bp, Artificial Sequence
  Description of Artificial Sequence:  Enzymatic Nucleic acid
gcccggagggctagctacaacgaactgctgg

SEQ ID NO: 6709 - DNA, 31 bp, Artificial Sequence
  Description of Artificial Sequence:  Enzymatic Nucleic acid
cggcagcgggctagctacaacgaccggagca

SEQ ID NO: 6710 - DNA, 31 bp, Artificial Sequence
  Description of Artificial Sequence:  Enzymatic Nucleic acid
cacggcagggctagctacaacgagcccggag

SEQ ID NO: 6711 - DNA, 31 bp, Artificial Sequence
  Description of Artificial Sequence:  Enzymatic Nucleic acid
tgccacggggctagctacaacgaagcgcccg

SEQ ID NO: 6712 - DNA, 31 bp, Artificial Sequence
  Description of Artificial Sequence:  Enzymatic Nucleic acid
acttgccaggctagctacaacgaggcagcgc

SEQ ID NO: 6713 - DNA, 31 bp, Artificial Sequence
  Description of Artificial Sequence:  Enzymatic Nucleic acid
gggacttgggctagctacaacgacacggcag

SEQ ID NO: 6714 - DNA, 31 bp, Artificial Sequence
  Description of Artificial Sequence:  Enzymatic Nucleic acid
ctgggggaggctagctacaacgattgccacg

SEQ ID NO: 6715 - DNA, 31 bp, Artificial Sequence
  Description of Artificial Sequence:  Enzymatic Nucleic acid
agcagtcaggctagctacaacgatgggggac

SEQ ID NO: 6716 - DNA, 31 bp, Artificial Sequence
  Description of Artificial Sequence:  Enzymatic Nucleic acid
ggcagcagggctagctacaacgacactgggg

SEQ ID NO: 6717 - DNA, 31 bp, Artificial Sequence
  Description of Artificial Sequence:  Enzymatic Nucleic acid
tgtggcagggctagctacaacgaagtcactg

SEQ ID NO: 6718 - DNA, 31 bp, Artificial Sequence
  Description of Artificial Sequence:  Enzymatic Nucleic acid
ggttgtggggctagctacaacgaagcagtca

SEQ ID NO: 6719 - DNA, 31 bp, Artificial Sequence
  Description of Artificial Sequence:  Enzymatic Nucleic acid
actggttgggctagctacaacgaggcagcag

SEQ ID NO: 6720 - DNA, 31 bp, Artificial Sequence
  Description of Artificial Sequence:  Enzymatic Nucleic acid
cacactggggctagctacaacgatgtggcag

SEQ ID NO: 6721 - DNA, 31 bp, Artificial Sequence
  Description of Artificial Sequence:  Enzymatic Nucleic acid
gcagcacaggctagctacaacgatggttgtg

SEQ ID NO: 6722 - DNA, 31 bp, Artificial Sequence
  Description of Artificial Sequence:  Enzymatic Nucleic acid
ctgcagcaggctagctacaacgaactggttg

SEQ ID NO: 6723 - DNA, 31 bp, Artificial Sequence
  Description of Artificial Sequence:  Enzymatic Nucleic acid
gcctgcagggctagctacaacgaacactggt

SEQ ID NO: 6724 - DNA, 31 bp, Artificial Sequence
  Description of Artificial Sequence:  Enzymatic Nucleic acid
gcagcctgggctagctacaacgaagcacact

SEQ ID NO: 6725 - DNA, 31 bp, Artificial Sequence
  Description of Artificial Sequence:  Enzymatic Nucleic acid
ctgtgcagggctagctacaacgactgcagca

SEQ ID NO: 6726 - DNA, 31 bp, Artificial Sequence
  Description of Artificial Sequence:  Enzymatic Nucleic acid
ggcctgtgggctagctacaacgaagcctgca

SEQ ID NO: 6727 - DNA, 31 bp, Artificial Sequence
  Description of Artificial Sequence:  Enzymatic Nucleic acid
ggggcctgggctagctacaacgagcagcctg

SEQ ID NO: 6728 - DNA, 31 bp, Artificial Sequence
  Description of Artificial Sequence:  Enzymatic Nucleic acid
cccgggggggctagctacaacgactgtgcag

SEQ ID NO: 6729 - DNA, 31 bp, Artificial Sequence
  Description of Artificial Sequence:  Enzymatic Nucleic acid
ggcagtcgggctagctacaacgatctcccgg

SEQ ID NO: 6730 - DNA, 31 bp, Artificial Sequence
  Description of Artificial Sequence:  Enzymatic Nucleic acid
ccaggcagggctagctacaacgacgctctcc

SEQ ID NO: 6731 - DNA, 31 bp, Artificial Sequence
  Description of Artificial Sequence:  Enzymatic Nucleic acid
agaccaggggctagctacaacgaagtcgctc

SEQ ID NO: 6732 - DNA, 31 bp, Artificial Sequence
  Description of Artificial Sequence:  Enzymatic Nucleic acid
gcggcagaggctagctacaacgacaggcagt

SEQ ID NO: 6733 - DNA, 31 bp, Artificial Sequence
  Description of Artificial Sequence:  Enzymatic Nucleic acid
atttgcggggctagctacaacgaagaccagg

SEQ ID NO: 6734 - DNA, 31 bp, Artificial Sequence
  Description of Artificial Sequence:  Enzymatic Nucleic acid
ggaatttgggctagctacaacgaggcagacc

SEQ ID NO: 6735 - DNA, 31 bp, Artificial Sequence
  Description of Artificial Sequence:  Enzymatic Nucleic acid
tctcggaaggctagctacaacgattgcggca

SEQ ID NO: 6736 - DNA, 31 bp, Artificial Sequence
  Description of Artificial Sequence:  Enzymatic Nucleic acid
tggcttcgggctagctacaacgactcggaat

SEQ ID NO: 6737 - DNA, 31 bp, Artificial Sequence
  Description of Artificial Sequence:  Enzymatic Nucleic acid
gcacgtggggctagctacaacgattcgtctc

SEQ ID NO: 6738 - DNA, 31 bp, Artificial Sequence
  Description of Artificial Sequence:  Enzymatic Nucleic acid
cttgcacgggctagctacaacgaggcttcgt

SEQ ID NO: 6739 - DNA, 31 bp, Artificial Sequence
  Description of Artificial Sequence:  Enzymatic Nucleic acid
tccttgcaggctagctacaacgagtggcttc

SEQ ID NO: 6740 - DNA, 31 bp, Artificial Sequence
  Description of Artificial Sequence:  Enzymatic Nucleic acid
tgtccttgggctagctacaacgaacgtggct

SEQ ID NO: 6741 - DNA, 31 bp, Artificial Sequence
  Description of Artificial Sequence:  Enzymatic Nucleic acid
ggcaggtgggctagctacaacgaccttgcac

SEQ ID NO: 6742 - DNA, 31 bp, Artificial Sequence
  Description of Artificial Sequence:  Enzymatic Nucleic acid
ggggcaggggctagctacaacgagtccttgc

SEQ ID NO: 6743 - DNA, 31 bp, Artificial Sequence
  Description of Artificial Sequence:  Enzymatic Nucleic acid
gtggggggggctagctacaacgaaggtgtcc

SEQ ID NO: 6744 - DNA, 31 bp, Artificial Sequence
  Description of Artificial Sequence:  Enzymatic Nucleic acid
agcatgagggctagctacaacgaggggggca

SEQ ID NO: 6745 - DNA, 31 bp, Artificial Sequence
  Description of Artificial Sequence:  Enzymatic Nucleic acid
gtagagcaggctagctacaacgagagtgggg

SEQ ID NO: 6746 - DNA, 31 bp, Artificial Sequence
  Description of Artificial Sequence:  Enzymatic Nucleic acid
ttgtagagggctagctacaacgaatgagtgg

SEQ ID NO: 6747 - DNA, 31 bp, Artificial Sequence
  Description of Artificial Sequence:  Enzymatic Nucleic acid
tggggttgggctagctacaacgaagagcatg

SEQ ID NO: 6748 - DNA, 31 bp, Artificial Sequence
  Description of Artificial Sequence:  Enzymatic Nucleic acid
tggtggggggctagctacaacgatgtagagc

SEQ ID NO: 6749 - DNA, 31 bp, Artificial Sequence
  Description of Artificial Sequence:  Enzymatic Nucleic acid
gtacgtggggctagctacaacgaggggttgt

SEQ ID NO: 6750 - DNA, 31 bp, Artificial Sequence
  Description of Artificial Sequence:  Enzymatic Nucleic acid
ctggtacgggctagctacaacgaggtggggt

SEQ ID NO: 6751 - DNA, 31 bp, Artificial Sequence
  Description of Artificial Sequence:  Enzymatic Nucleic acid
atctggtaggctagctacaacgagtggtggg

SEQ ID NO: 6752 - DNA, 31 bp, Artificial Sequence
  Description of Artificial Sequence:  Enzymatic Nucleic acid
ccatctggggctagctacaacgaacgtggtg

SEQ ID NO: 6753 - DNA, 31 bp, Artificial Sequence
  Description of Artificial Sequence:  Enzymatic Nucleic acid
cacatccaggctagctacaacgactggtacg

SEQ ID NO: 6754 - DNA, 31 bp, Artificial Sequence
  Description of Artificial Sequence:  Enzymatic Nucleic acid
ggttcacaggctagctacaacgaccatctgg

SEQ ID NO: 6755 - DNA, 31 bp, Artificial Sequence
  Description of Artificial Sequence:  Enzymatic Nucleic acid
ggggttcaggctagctacaacgaatccatct

SEQ ID NO: 6756 - DNA, 31 bp, Artificial Sequence
  Description of Artificial Sequence:  Enzymatic Nucleic acid
cctcggggggctagctacaacgatcacatcc

SEQ ID NO: 6757 - DNA, 31 bp, Artificial Sequence
  Description of Artificial Sequence:  Enzymatic Nucleic acid
tgtatttgggctagctacaacgacctcgggg

SEQ ID NO: 6758 - DNA, 31 bp, Artificial Sequence
  Description of Artificial Sequence:  Enzymatic Nucleic acid
aagctgtaggctagctacaacgattgccctc

SEQ ID NO: 6759 - DNA, 31 bp, Artificial Sequence
  Description of Artificial Sequence:  Enzymatic Nucleic acid
caaagctgggctagctacaacgaatttgccc

SEQ ID NO: 6760 - DNA, 31 bp, Artificial Sequence
  Description of Artificial Sequence:  Enzymatic Nucleic acid
caccaaagggctagctacaacgatgtatttg

SEQ ID NO: 6761 - DNA, 31 bp, Artificial Sequence
  Description of Artificial Sequence:  Enzymatic Nucleic acid
aggtggcaggctagctacaacgacaaagctg

SEQ ID NO: 6762 - DNA, 31 bp, Artificial Sequence
  Description of Artificial Sequence:  Enzymatic Nucleic acid
gcaggtggggctagctacaacgaaccaaagc

SEQ ID NO: 6763 - DNA, 31 bp, Artificial Sequence
  Description of Artificial Sequence:  Enzymatic Nucleic acid
cacgcaggggctagctacaacgaggcaccaa

SEQ ID NO: 6764 - DNA, 31 bp, Artificial Sequence
  Description of Artificial Sequence:  Enzymatic Nucleic acid
tcttcacgggctagctacaacgaaggtggca

SEQ ID NO: 6765 - DNA, 31 bp, Artificial Sequence
  Description of Artificial Sequence:  Enzymatic Nucleic acid
cttcttcaggctagctacaacgagcaggtgg

SEQ ID NO: 6766 - DNA, 31 bp, Artificial Sequence
  Description of Artificial Sequence:  Enzymatic Nucleic acid
cggggacaggctagctacaacgattcttcac

SEQ ID NO: 6767 - DNA, 31 bp, Artificial Sequence
  Description of Artificial Sequence:  Enzymatic Nucleic acid
tacggggaggctagctacaacgaacttcttc

SEQ ID NO: 6768 - DNA, 31 bp, Artificial Sequence
  Description of Artificial Sequence:  Enzymatic Nucleic acid
cataattaggctagctacaacgaggggacac

SEQ ID NO: 6769 - DNA, 31 bp, Artificial Sequence
  Description of Artificial Sequence:  Enzymatic Nucleic acid
ccacataaggctagctacaacgatacgggga

SEQ ID NO: 6770 - DNA, 31 bp, Artificial Sequence
  Description of Artificial Sequence:  Enzymatic Nucleic acid
tcaccacaggctagctacaacgaaattacgg

SEQ ID NO: 6771 - DNA, 31 bp, Artificial Sequence
  Description of Artificial Sequence:  Enzymatic Nucleic acid
tgtcaccaggctagctacaacgaataattac

SEQ ID NO: 6772 - DNA, 31 bp, Artificial Sequence
  Description of Artificial Sequence:  Enzymatic Nucleic acid
atctgtcaggctagctacaacgacacataat

SEQ ID NO: 6773 - DNA, 31 bp, Artificial Sequence
  Description of Artificial Sequence:  Enzymatic Nucleic acid
gtgatctgggctagctacaacgacaccacat

SEQ ID NO: 6774 - DNA, 31 bp, Artificial Sequence
  Description of Artificial Sequence:  Enzymatic Nucleic acid
agccgtgaggctagctacaacgactgtcacc

SEQ ID NO: 6775 - DNA, 31 bp, Artificial Sequence
  Description of Artificial Sequence:  Enzymatic Nucleic acid
acgagccgggctagctacaacgagatctgtc

SEQ ID NO: 6776 - DNA, 31 bp, Artificial Sequence
  Description of Artificial Sequence:  Enzymatic Nucleic acid
cgcacgagggctagctacaacgacgtgatct

SEQ ID NO: 6777 - DNA, 31 bp, Artificial Sequence
  Description of Artificial Sequence:  Enzymatic Nucleic acid
cggacgcaggctagctacaacgagagccgtg

SEQ ID NO: 6778 - DNA, 31 bp, Artificial Sequence
  Description of Artificial Sequence:  Enzymatic Nucleic acid
ctcggacgggctagctacaacgaacgagccg

SEQ ID NO: 6779 - DNA, 31 bp, Artificial Sequence
  Description of Artificial Sequence:  Enzymatic Nucleic acid
ggctcggaggctagctacaacgagcacgagc

SEQ ID NO: 6780 - DNA, 31 bp, Artificial Sequence
  Description of Artificial Sequence:  Enzymatic Nucleic acid
cccacaggggctagctacaacgatcggacgc

SEQ ID NO: 6781 - DNA, 31 bp, Artificial Sequence
  Description of Artificial Sequence:  Enzymatic Nucleic acid
cggccccaggctagctacaacgaaggctcgg

SEQ ID NO: 6782 - DNA, 31 bp, Artificial Sequence
  Description of Artificial Sequence:  Enzymatic Nucleic acid
gctgtcggggctagctacaacgacccacagg

SEQ ID NO: 6783 - DNA, 31 bp, Artificial Sequence
  Description of Artificial Sequence:  Enzymatic Nucleic acid
catagctgggctagctacaacgacggcccca

SEQ ID NO: 6784 - DNA, 31 bp, Artificial Sequence
  Description of Artificial Sequence:  Enzymatic Nucleic acid
tctcatagggctagctacaacgatgtcggcc

SEQ ID NO: 6785 - DNA, 31 bp, Artificial Sequence
  Description of Artificial Sequence:  Enzymatic Nucleic acid
ccatctcaggctagctacaacgaagctgtcg

SEQ ID NO: 6786 - DNA, 31 bp, Artificial Sequence
  Description of Artificial Sequence:  Enzymatic Nucleic acid
ttcctccaggctagctacaacgactcatagc

SEQ ID NO: 6787 - DNA, 31 bp, Artificial Sequence
  Description of Artificial Sequence:  Enzymatic Nucleic acid
ggacgccgggctagctacaacgacttcctcc

SEQ ID NO: 6788 - DNA, 31 bp, Artificial Sequence
  Description of Artificial Sequence:  Enzymatic Nucleic acid
tgcggacgggctagctacaacgacgtcttcc

SEQ ID NO: 6789 - DNA, 31 bp, Artificial Sequence
  Description of Artificial Sequence:  Enzymatic Nucleic acid
cttgcggaggctagctacaacgagccgtctt

SEQ ID NO: 6790 - DNA, 31 bp, Artificial Sequence
  Description of Artificial Sequence:  Enzymatic Nucleic acid
tacacttgggctagctacaacgaggacgccg

SEQ ID NO: 6791 - DNA, 31 bp, Artificial Sequence
  Description of Artificial Sequence:  Enzymatic Nucleic acid
ttcttacaggctagctacaacgattgcggac

SEQ ID NO: 6792 - DNA, 31 bp, Artificial Sequence
  Description of Artificial Sequence:  Enzymatic Nucleic acid
acttcttaggctagctacaacgaacttgcgg

SEQ ID NO: 6793 - DNA, 31 bp, Artificial Sequence
  Description of Artificial Sequence:  Enzymatic Nucleic acid
ccttcgcaggctagctacaacgattcttaca

SEQ ID NO: 6794 - DNA, 31 bp, Artificial Sequence
  Description of Artificial Sequence:  Enzymatic Nucleic acid
gcccttcgggctagctacaacgaacttctta

SEQ ID NO: 6795 - DNA, 31 bp, Artificial Sequence
  Description of Artificial Sequence:  Enzymatic Nucleic acid
cggcaaggggctagctacaacgaccttcgca

SEQ ID NO: 6796 - DNA, 31 bp, Artificial Sequence
  Description of Artificial Sequence:  Enzymatic Nucleic acid
ctttgcggggctagctacaacgaaaggccct

SEQ ID NO: 6797 - DNA, 31 bp, Artificial Sequence
  Description of Artificial Sequence:  Enzymatic Nucleic acid
acactttgggctagctacaacgaggcaaggc

SEQ ID NO: 6798 - DNA, 31 bp, Artificial Sequence
  Description of Artificial Sequence:  Enzymatic Nucleic acid
gttacacaggctagctacaacgatttgcggc

SEQ ID NO: 6799 - DNA, 31 bp, Artificial Sequence
  Description of Artificial Sequence:  Enzymatic Nucleic acid
ccgttacaggctagctacaacgaactttgcg

SEQ ID NO: 6800 - DNA, 31 bp, Artificial Sequence
  Description of Artificial Sequence:  Enzymatic Nucleic acid
ttccgttaggctagctacaacgaacactttg

SEQ ID NO: 6801 - DNA, 31 bp, Artificial Sequence
  Description of Artificial Sequence:  Enzymatic Nucleic acid
ctattccgggctagctacaacgatacacact

SEQ ID NO: 6802 - DNA, 31 bp, Artificial Sequence
  Description of Artificial Sequence:  Enzymatic Nucleic acid
aatacctaggctagctacaacgatccgttac

SEQ ID NO: 6803 - DNA, 31 bp, Artificial Sequence
  Description of Artificial Sequence:  Enzymatic Nucleic acid
caccaataggctagctacaacgactattccg

SEQ ID NO: 6804 - DNA, 31 bp, Artificial Sequence
  Description of Artificial Sequence:  Enzymatic Nucleic acid
ttcaccaaggctagctacaacgaacctattc

SEQ ID NO: 6805 - DNA, 31 bp, Artificial Sequence
  Description of Artificial Sequence:  Enzymatic Nucleic acid
taaattcaggctagctacaacgacaatacct

SEQ ID NO: 6806 - DNA, 31 bp, Artificial Sequence
  Description of Artificial Sequence:  Enzymatic Nucleic acid
tctttaaaggctagctacaacgatcaccaat

SEQ ID NO: 6807 - DNA, 31 bp, Artificial Sequence
  Description of Artificial Sequence:  Enzymatic Nucleic acid
agagtgagggctagctacaacgactttaaat

SEQ ID NO: 6808 - DNA, 31 bp, Artificial Sequence
  Description of Artificial Sequence:  Enzymatic Nucleic acid
atggagagggctagctacaacgagagtcttt

SEQ ID NO: 6809 - DNA, 31 bp, Artificial Sequence
  Description of Artificial Sequence:  Enzymatic Nucleic acid
agcatttaggctagctacaacgaggagagtg

SEQ ID NO: 6810 - DNA, 31 bp, Artificial Sequence
  Description of Artificial Sequence:  Enzymatic Nucleic acid
tcgtagcaggctagctacaacgattatggag

SEQ ID NO: 6811 - DNA, 31 bp, Artificial Sequence
  Description of Artificial Sequence:  Enzymatic Nucleic acid
attcgtagggctagctacaacgaatttatgg

SEQ ID NO: 6812 - DNA, 31 bp, Artificial Sequence
  Description of Artificial Sequence:  Enzymatic Nucleic acid
aatattcgggctagctacaacgaagcattta

SEQ ID NO: 6813 - DNA, 31 bp, Artificial Sequence
  Description of Artificial Sequence:  Enzymatic Nucleic acid
gtttaataggctagctacaacgatcgtagca

SEQ ID NO: 6814 - DNA, 31 bp, Artificial Sequence
  Description of Artificial Sequence:  Enzymatic Nucleic acid
gtgtttaaggctagctacaacgaattcgtag

SEQ ID NO: 6815 - DNA, 31 bp, Artificial Sequence
  Description of Artificial Sequence:  Enzymatic Nucleic acid
ttgaagtgggctagctacaacgattaatatt

SEQ ID NO: 6816 - DNA, 31 bp, Artificial Sequence
  Description of Artificial Sequence:  Enzymatic Nucleic acid
ttttgaagggctagctacaacgagtttaata

SEQ ID NO: 6817 - DNA, 31 bp, Artificial Sequence
  Description of Artificial Sequence:  Enzymatic Nucleic acid
aggtgcagggctagctacaacgattttgaag

SEQ ID NO: 6818 - DNA, 31 bp, Artificial Sequence
  Description of Artificial Sequence:  Enzymatic Nucleic acid
tggaggtgggctagctacaacgaagtttttg

SEQ ID NO: 6819 - DNA, 31 bp, Artificial Sequence
  Description of Artificial Sequence:  Enzymatic Nucleic acid
gatggaggggctagctacaacgagcagtttt

SEQ ID NO: 6820 - DNA, 31 bp, Artificial Sequence
  Description of Artificial Sequence:  Enzymatic Nucleic acid
gccactgaggctagctacaacgaggaggtgc

SEQ ID NO: 6821 - DNA, 31 bp, Artificial Sequence
  Description of Artificial Sequence:  Enzymatic Nucleic acid
gatcgccaggctagctacaacgatgatggag

SEQ ID NO: 6822 - DNA, 31 bp, Artificial Sequence
  Description of Artificial Sequence:  Enzymatic Nucleic acid
ggagatcgggctagctacaacgacactgatg

SEQ ID NO: 6823 - DNA, 31 bp, Artificial Sequence
  Description of Artificial Sequence:  Enzymatic Nucleic acid
tgtggagaggctagctacaacgacgccactg

SEQ ID NO: 6824 - DNA, 31 bp, Artificial Sequence
  Description of Artificial Sequence:  Enzymatic Nucleic acid
gcaggatgggctagctacaacgaggagatcg

SEQ ID NO: 6825 - DNA, 31 bp, Artificial Sequence
  Description of Artificial Sequence:  Enzymatic Nucleic acid
cggcaggaggctagctacaacgagtggagat

SEQ ID NO: 6826 - DNA, 31 bp, Artificial Sequence
  Description of Artificial Sequence:  Enzymatic Nucleic acid
gccaccggggctagctacaacgaaggatgtg

SEQ ID NO: 6827 - DNA, 31 bp, Artificial Sequence
  Description of Artificial Sequence:  Enzymatic Nucleic acid
aaatgccaggctagctacaacgacggcagga

SEQ ID NO: 6828 - DNA, 31 bp, Artificial Sequence
  Description of Artificial Sequence:  Enzymatic Nucleic acid
cctaaatgggctagctacaacgacaccggca

SEQ ID NO: 6829 - DNA, 31 bp, Artificial Sequence
  Description of Artificial Sequence:  Enzymatic Nucleic acid
cccctaaaggctagctacaacgagccaccgg

SEQ ID NO: 6830 - DNA, 31 bp, Artificial Sequence
  Description of Artificial Sequence:  Enzymatic Nucleic acid
aggagtcaggctagctacaacgaccctaaat

SEQ ID NO: 6831 - DNA, 31 bp, Artificial Sequence
  Description of Artificial Sequence:  Enzymatic Nucleic acid
tgaaggagggctagctacaacgacaccccta

SEQ ID NO: 6832 - DNA, 31 bp, Artificial Sequence
  Description of Artificial Sequence:  Enzymatic Nucleic acid
agtatgtgggctagctacaacgagaaggagt

SEQ ID NO: 6833 - DNA, 31 bp, Artificial Sequence
  Description of Artificial Sequence:  Enzymatic Nucleic acid
ggagtatgggctagctacaacgagtgaagga

SEQ ID NO: 6834 - DNA, 31 bp, Artificial Sequence
  Description of Artificial Sequence:  Enzymatic Nucleic acid
gaggagtaggctagctacaacgagtgtgaag

SEQ ID NO: 6835 - DNA, 31 bp, Artificial Sequence
  Description of Artificial Sequence:  Enzymatic Nucleic acid
aggaggagggctagctacaacgaatgtgtga

SEQ ID NO: 6836 - DNA, 31 bp, Artificial Sequence
  Description of Artificial Sequence:  Enzymatic Nucleic acid
cctgtggaggctagctacaacgaccagagga

SEQ ID NO: 6837 - DNA, 31 bp, Artificial Sequence
  Description of Artificial Sequence:  Enzymatic Nucleic acid
agttcctgggctagctacaacgaggatccag

SEQ ID NO: 6838 - DNA, 31 bp, Artificial Sequence
  Description of Artificial Sequence:  Enzymatic Nucleic acid
atatccagggctagctacaacgatcctgtgg

SEQ ID NO: 6839 - DNA, 31 bp, Artificial Sequence
  Description of Artificial Sequence:  Enzymatic Nucleic acid
tcagaataggctagctacaacgaccagttcc

SEQ ID NO: 6840 - DNA, 31 bp, Artificial Sequence
  Description of Artificial Sequence:  Enzymatic Nucleic acid
tttcagaaggctagctacaacgaatccagtt

SEQ ID NO: 6841 - DNA, 31 bp, Artificial Sequence
  Description of Artificial Sequence:  Enzymatic Nucleic acid
ctttacggggctagctacaacgatttcagaa

SEQ ID NO: 6842 - DNA, 31 bp, Artificial Sequence
  Description of Artificial Sequence:  Enzymatic Nucleic acid
ttcctttaggctagctacaacgaggttttca

SEQ ID NO: 6843 - DNA, 31 bp, Artificial Sequence
  Description of Artificial Sequence:  Enzymatic Nucleic acid
ccctgtgaggctagctacaacgattccttta

SEQ ID NO: 6844 - DNA, 31 bp, Artificial Sequence
  Description of Artificial Sequence:  Enzymatic Nucleic acid
aaaccctgggctagctacaacgagatttcct

SEQ ID NO: 6845 - DNA, 31 bp, Artificial Sequence
  Description of Artificial Sequence:  Enzymatic Nucleic acid
agcaaaaaggctagctacaacgacctgtgat

SEQ ID NO: 6846 - DNA, 31 bp, Artificial Sequence
  Description of Artificial Sequence:  Enzymatic Nucleic acid
tgaatcagggctagctacaacgaaaaaaccc

SEQ ID NO: 6847 - DNA, 31 bp, Artificial Sequence
  Description of Artificial Sequence:  Enzymatic Nucleic acid
agcctgaaggctagctacaacgacagcaaaa

SEQ ID NO: 6848 - DNA, 31 bp, Artificial Sequence
  Description of Artificial Sequence:  Enzymatic Nucleic acid
aggccaagggctagctacaacgactgaatca

SEQ ID NO: 6849 - DNA, 31 bp, Artificial Sequence
  Description of Artificial Sequence:  Enzymatic Nucleic acid
ttttcaggggctagctacaacgacaagcctg

SEQ ID NO: 6850 - DNA, 31 bp, Artificial Sequence
  Description of Artificial Sequence:  Enzymatic Nucleic acid
ccgtcctgggctagctacaacgatttcaggc

SEQ ID NO: 6851 - DNA, 31 bp, Artificial Sequence
  Description of Artificial Sequence:  Enzymatic Nucleic acid
gaggtccgggctagctacaacgacctgtttt

SEQ ID NO: 6852 - DNA, 31 bp, Artificial Sequence
  Description of Artificial Sequence:  Enzymatic Nucleic acid
catggaggggctagctacaacgaccgtcctg

SEQ ID NO: 6853 - DNA, 31 bp, Artificial Sequence
  Description of Artificial Sequence:  Enzymatic Nucleic acid
caaaggcaggctagctacaacgaggaggtcc

SEQ ID NO: 6854 - DNA, 31 bp, Artificial Sequence
  Description of Artificial Sequence:  Enzymatic Nucleic acid
ctcaaaggggctagctacaacgaatggaggt

SEQ ID NO: 6855 - DNA, 31 bp, Artificial Sequence
  Description of Artificial Sequence:  Enzymatic Nucleic acid
tttctaggggctagctacaacgatctcaaag

SEQ ID NO: 6856 - DNA, 31 bp, Artificial Sequence
  Description of Artificial Sequence:  Enzymatic Nucleic acid
gcgtatgaggctagctacaacgattctaggt

SEQ ID NO: 6857 - DNA, 31 bp, Artificial Sequence
  Description of Artificial Sequence:  Enzymatic Nucleic acid
gccgcgtaggctagctacaacgagatttcta

SEQ ID NO: 6858 - DNA, 31 bp, Artificial Sequence
  Description of Artificial Sequence:  Enzymatic Nucleic acid
ctgccgcgggctagctacaacgaatgatttc

SEQ ID NO: 6859 - DNA, 31 bp, Artificial Sequence
  Description of Artificial Sequence:  Enzymatic Nucleic acid
tcctgccgggctagctacaacgagtatgatt

SEQ ID NO: 6860 - DNA, 31 bp, Artificial Sequence
  Description of Artificial Sequence:  Enzymatic Nucleic acid
tggtcctgggctagctacaacgacgcgtatg

SEQ ID NO: 6861 - DNA, 31 bp, Artificial Sequence
  Description of Artificial Sequence:  Enzymatic Nucleic acid
ttgcttggggctagctacaacgacctgccgc

SEQ ID NO: 6862 - DNA, 31 bp, Artificial Sequence
  Description of Artificial Sequence:  Enzymatic Nucleic acid
ccatgttgggctagctacaacgattggtcct

SEQ ID NO: 6863 - DNA, 31 bp, Artificial Sequence
  Description of Artificial Sequence:  Enzymatic Nucleic acid
tgaccatgggctagctacaacgatgcttggt

SEQ ID NO: 6864 - DNA, 31 bp, Artificial Sequence
  Description of Artificial Sequence:  Enzymatic Nucleic acid
actgaccaggctagctacaacgagttgcttg

SEQ ID NO: 6865 - DNA, 31 bp, Artificial Sequence
  Description of Artificial Sequence:  Enzymatic Nucleic acid
aaaactgaggctagctacaacgacatgttgc

SEQ ID NO: 6866 - DNA, 31 bp, Artificial Sequence
  Description of Artificial Sequence:  Enzymatic Nucleic acid
agagaaaaggctagctacaacgatgaccatg

SEQ ID NO: 6867 - DNA, 31 bp, Artificial Sequence
  Description of Artificial Sequence:  Enzymatic Nucleic acid
gacgactgggctagctacaacgaaagagaaa

SEQ ID NO: 6868 - DNA, 31 bp, Artificial Sequence
  Description of Artificial Sequence:  Enzymatic Nucleic acid
gctgacgaggctagctacaacgatgcaagag

SEQ ID NO: 6869 - DNA, 31 bp, Artificial Sequence
  Description of Artificial Sequence:  Enzymatic Nucleic acid
caggctgaggctagctacaacgagactgcaa

SEQ ID NO: 6870 - DNA, 31 bp, Artificial Sequence
  Description of Artificial Sequence:  Enzymatic Nucleic acid
tgttcaggggctagctacaacgatgacgact

SEQ ID NO: 6871 - DNA, 31 bp, Artificial Sequence
  Description of Artificial Sequence:  Enzymatic Nucleic acid
atgttatgggctagctacaacgatcaggctg

SEQ ID NO: 6872 - DNA, 31 bp, Artificial Sequence
  Description of Artificial Sequence:  Enzymatic Nucleic acid
ggatgttaggctagctacaacgagttcaggc

SEQ ID NO: 6873 - DNA, 31 bp, Artificial Sequence
  Description of Artificial Sequence:  Enzymatic Nucleic acid
caaggatgggctagctacaacgatatgttca

SEQ ID NO: 6874 - DNA, 31 bp, Artificial Sequence
  Description of Artificial Sequence:  Enzymatic Nucleic acid
cccaaggaggctagctacaacgagttatgtt

SEQ ID NO: 6875 - DNA, 31 bp, Artificial Sequence
  Description of Artificial Sequence:  Enzymatic Nucleic acid
gagcgtaaggctagctacaacgacccaagga

SEQ ID NO: 6876 - DNA, 31 bp, Artificial Sequence
  Description of Artificial Sequence:  Enzymatic Nucleic acid
agggagcgggctagctacaacgaaatcccaa

SEQ ID NO: 6877 - DNA, 31 bp, Artificial Sequence
  Description of Artificial Sequence:  Enzymatic Nucleic acid
tgagggagggctagctacaacgagtaatccc

SEQ ID NO: 6878 - DNA, 31 bp, Artificial Sequence
  Description of Artificial Sequence:  Enzymatic Nucleic acid
atcacttaggctagctacaacgactccttga

SEQ ID NO: 6879 - DNA, 31 bp, Artificial Sequence
  Description of Artificial Sequence:  Enzymatic Nucleic acid
ctccatcaggctagctacaacgattatctcc

SEQ ID NO: 6880 - DNA, 31 bp, Artificial Sequence
  Description of Artificial Sequence:  Enzymatic Nucleic acid
catctccaggctagctacaacgacacttatc

SEQ ID NO: 6881 - DNA, 31 bp, Artificial Sequence
  Description of Artificial Sequence:  Enzymatic Nucleic acid
ttatcacaggctagctacaacgactccatca

SEQ ID NO: 6882 - DNA, 31 bp, Artificial Sequence
  Description of Artificial Sequence:  Enzymatic Nucleic acid
aattatcaggctagctacaacgaatctccat

SEQ ID NO: 6883 - DNA, 31 bp, Artificial Sequence
  Description of Artificial Sequence:  Enzymatic Nucleic acid
tgaaattaggctagctacaacgacacatctc

SEQ ID NO: 6884 - DNA, 31 bp, Artificial Sequence
  Description of Artificial Sequence:  Enzymatic Nucleic acid
tcctgaaaggctagctacaacgatatcacat

SEQ ID NO: 6885 - DNA, 31 bp, Artificial Sequence
  Description of Artificial Sequence:  Enzymatic Nucleic acid
aatttttgggctagctacaacgattcctgaa

SEQ ID NO: 6886 - DNA, 31 bp, Artificial Sequence
  Description of Artificial Sequence:  Enzymatic Nucleic acid
agcacaaaggctagctacaacgattttgttt

SEQ ID NO: 6887 - DNA, 31 bp, Artificial Sequence
  Description of Artificial Sequence:  Enzymatic Nucleic acid
gcatagcaggctagctacaacgaaaattttt

SEQ ID NO: 6888 - DNA, 31 bp, Artificial Sequence
  Description of Artificial Sequence:  Enzymatic Nucleic acid
ttgcatagggctagctacaacgaacaaattt

SEQ ID NO: 6889 - DNA, 31 bp, Artificial Sequence
  Description of Artificial Sequence:  Enzymatic Nucleic acid
tatttgcaggctagctacaacgaagcacaaa

SEQ ID NO: 6890 - DNA, 31 bp, Artificial Sequence
  Description of Artificial Sequence:  Enzymatic Nucleic acid
tgtatttgggctagctacaacgaatagcaca

SEQ ID NO: 6891 - DNA, 31 bp, Artificial Sequence
  Description of Artificial Sequence:  Enzymatic Nucleic acid
ttattgtaggctagctacaacgattgcatag

SEQ ID NO: 6892 - DNA, 31 bp, Artificial Sequence
  Description of Artificial Sequence:  Enzymatic Nucleic acid
gtttattgggctagctacaacgaatttgcat

SEQ ID NO: 6893 - DNA, 31 bp, Artificial Sequence
  Description of Artificial Sequence:  Enzymatic Nucleic acid
ccagtttaggctagctacaacgatgtatttg

SEQ ID NO: 6894 - DNA, 31 bp, Artificial Sequence
  Description of Artificial Sequence:  Enzymatic Nucleic acid
ttttccagggctagctacaacgattattgta

SEQ ID NO: 6895 - DNA, 31 bp, Artificial Sequence
  Description of Artificial Sequence:  Enzymatic Nucleic acid
ccaaacagggctagctacaacgatttttcca

SEQ ID NO: 6896 - DNA, 31 bp, Artificial Sequence
  Description of Artificial Sequence:  Enzymatic Nucleic acid
gtcccaaaggctagctacaacgaagtttttt

SEQ ID NO: 6897 - DNA, 31 bp, Artificial Sequence
  Description of Artificial Sequence:  Enzymatic Nucleic acid
accggaggggctagctacaacgacccaaaca

SEQ ID NO: 6898 - DNA, 31 bp, Artificial Sequence
  Description of Artificial Sequence:  Enzymatic Nucleic acid
ttttctgaggctagctacaacgacggaggtc

SEQ ID NO: 6899 - DNA, 31 bp, Artificial Sequence
  Description of Artificial Sequence:  Enzymatic Nucleic acid
aattttggggctagctacaacgatttctgac

SEQ ID NO: 6900 - DNA, 31 bp, Artificial Sequence
  Description of Artificial Sequence:  Enzymatic Nucleic acid
gcttataaggctagctacaacgatttggttt

SEQ ID NO: 6901 - DNA, 31 bp, Artificial Sequence
  Description of Artificial Sequence:  Enzymatic Nucleic acid
gttgcttaggctagctacaacgaaattttgg

SEQ ID NO: 6902 - DNA, 31 bp, Artificial Sequence
  Description of Artificial Sequence:  Enzymatic Nucleic acid
ctctgttgggctagctacaacgattataatt

SEQ ID NO: 6903 - DNA, 31 bp, Artificial Sequence
  Description of Artificial Sequence:  Enzymatic Nucleic acid
cacctctgggctagctacaacgatgcttata

SEQ ID NO: 6904 - DNA, 31 bp, Artificial Sequence
  Description of Artificial Sequence:  Enzymatic Nucleic acid
tgttttcaggctagctacaacgactctgttg

SEQ ID NO: 6905 - DNA, 31 bp, Artificial Sequence
  Description of Artificial Sequence:  Enzymatic Nucleic acid
tgcagctgggctagctacaacgatttcacct

SEQ ID NO: 6906 - DNA, 31 bp, Artificial Sequence
  Description of Artificial Sequence:  Enzymatic Nucleic acid
ccttgcagggctagctacaacgatgttttca

SEQ ID NO: 6907 - DNA, 31 bp, Artificial Sequence
  Description of Artificial Sequence:  Enzymatic Nucleic acid
tggccttgggctagctacaacgaagctgttt

SEQ ID NO: 6908 - DNA, 31 bp, Artificial Sequence
  Description of Artificial Sequence:  Enzymatic Nucleic acid
gcctgtggggctagctacaacgacttgcagc

SEQ ID NO: 6909 - DNA, 31 bp, Artificial Sequence
  Description of Artificial Sequence:  Enzymatic Nucleic acid
ctggcctgggctagctacaacgaggccttgc

SEQ ID NO: 6910 - DNA, 31 bp, Artificial Sequence
  Description of Artificial Sequence:  Enzymatic Nucleic acid
agacctggggctagctacaacgactgtggcc

SEQ ID NO: 6911 - DNA, 31 bp, Artificial Sequence
  Description of Artificial Sequence:  Enzymatic Nucleic acid
atggcagaggctagctacaacgactggcctg

SEQ ID NO: 6912 - DNA, 31 bp, Artificial Sequence
  Description of Artificial Sequence:  Enzymatic Nucleic acid
aggcatggggctagctacaacgaagacctgg

SEQ ID NO: 6913 - DNA, 31 bp, Artificial Sequence
  Description of Artificial Sequence:  Enzymatic Nucleic acid
acaaggcaggctagctacaacgaggcagacc

SEQ ID NO: 6914 - DNA, 31 bp, Artificial Sequence
  Description of Artificial Sequence:  Enzymatic Nucleic acid
gcacaaggggctagctacaacgaatggcaga

SEQ ID NO: 6915 - DNA, 31 bp, Artificial Sequence
  Description of Artificial Sequence:  Enzymatic Nucleic acid
ggggagcaggctagctacaacgaaaggcatg

SEQ ID NO: 6916 - DNA, 31 bp, Artificial Sequence
  Description of Artificial Sequence:  Enzymatic Nucleic acid
cgggggagggctagctacaacgaacaaggca

SEQ ID NO: 6917 - DNA, 31 bp, Artificial Sequence
  Description of Artificial Sequence:  Enzymatic Nucleic acid
cccagcagggctagctacaacgacctcgggg

SEQ ID NO: 6918 - DNA, 31 bp, Artificial Sequence
  Description of Artificial Sequence:  Enzymatic Nucleic acid
ggccccagggctagctacaacgaagccctcg

SEQ ID NO: 6919 - DNA, 31 bp, Artificial Sequence
  Description of Artificial Sequence:  Enzymatic Nucleic acid
gctccgggggctagctacaacgacccagcag

SEQ ID NO: 6920 - DNA, 31 bp, Artificial Sequence
  Description of Artificial Sequence:  Enzymatic Nucleic acid
tccctgggggctagctacaacgatccgggcc

SEQ ID NO: 6921 - DNA, 31 bp, Artificial Sequence
  Description of Artificial Sequence:  Enzymatic Nucleic acid
agacgcagggctagctacaacgaccctgggc

SEQ ID NO: 6922 - DNA, 31 bp, Artificial Sequence
  Description of Artificial Sequence:  Enzymatic Nucleic acid
aagagacgggctagctacaacgaagtccctg

SEQ ID NO: 6923 - DNA, 31 bp, Artificial Sequence
  Description of Artificial Sequence:  Enzymatic Nucleic acid
gcaagagaggctagctacaacgagcagtccc

SEQ ID NO: 6924 - DNA, 31 bp, Artificial Sequence
  Description of Artificial Sequence:  Enzymatic Nucleic acid
cattccggggctagctacaacgaaagagacg

SEQ ID NO: 6925 - DNA, 31 bp, Artificial Sequence
  Description of Artificial Sequence:  Enzymatic Nucleic acid
ggctgacaggctagctacaacgatccggcaa

SEQ ID NO: 6926 - DNA, 31 bp, Artificial Sequence
  Description of Artificial Sequence:  Enzymatic Nucleic acid
tcggctgaggctagctacaacgaattccggc

SEQ ID NO: 6927 - DNA, 31 bp, Artificial Sequence
  Description of Artificial Sequence:  Enzymatic Nucleic acid
tgcctcggggctagctacaacgatgacattc

SEQ ID NO: 6928 - DNA, 31 bp, Artificial Sequence
  Description of Artificial Sequence:  Enzymatic Nucleic acid
attccctgggctagctacaacgactcggctg

SEQ ID NO: 6929 - DNA, 31 bp, Artificial Sequence
  Description of Artificial Sequence:  Enzymatic Nucleic acid
tccacgcaggctagctacaacgatccctgcc

SEQ ID NO: 6930 - DNA, 31 bp, Artificial Sequence
  Description of Artificial Sequence:  Enzymatic Nucleic acid
tgtccacgggctagctacaacgaattccctg

SEQ ID NO: 6931 - DNA, 31 bp, Artificial Sequence
  Description of Artificial Sequence:  Enzymatic Nucleic acid
cttgtccaggctagctacaacgagcattccc

SEQ ID NO: 6932 - DNA, 31 bp, Artificial Sequence
  Description of Artificial Sequence:  Enzymatic Nucleic acid
tgcacttgggctagctacaacgaccacgcat

SEQ ID NO: 6933 - DNA, 31 bp, Artificial Sequence
  Description of Artificial Sequence:  Enzymatic Nucleic acid
agcttgcaggctagctacaacgattgtccac

SEQ ID NO: 6934 - DNA, 31 bp, Artificial Sequence
  Description of Artificial Sequence:  Enzymatic Nucleic acid
gaagcttgggctagctacaacgaacttgtcc

SEQ ID NO: 6935 - DNA, 31 bp, Artificial Sequence
  Description of Artificial Sequence:  Enzymatic Nucleic acid
tccagaagggctagctacaacgattgcactt

SEQ ID NO: 6936 - DNA, 31 bp, Artificial Sequence
  Description of Artificial Sequence:  Enzymatic Nucleic acid
ttggctcaggctagctacaacgacctccaga

SEQ ID NO: 6937 - DNA, 31 bp, Artificial Sequence
  Description of Artificial Sequence:  Enzymatic Nucleic acid
tcccttggggctagctacaacgatcaccctc

SEQ ID NO: 6938 - DNA, 31 bp, Artificial Sequence
  Description of Artificial Sequence:  Enzymatic Nucleic acid
tccacaaaggctagctacaacgatcccttgg

SEQ ID NO: 6939 - DNA, 31 bp, Artificial Sequence
  Description of Artificial Sequence:  Enzymatic Nucleic acid
gttctccaggctagctacaacgaaaactccc

SEQ ID NO: 6940 - DNA, 31 bp, Artificial Sequence
  Description of Artificial Sequence:  Enzymatic Nucleic acid
actcagagggctagctacaacgatctccaca

SEQ ID NO: 6941 - DNA, 31 bp, Artificial Sequence
  Description of Artificial Sequence:  Enzymatic Nucleic acid
tgtatgcaggctagctacaacgatcagagtt

SEQ ID NO: 6942 - DNA, 31 bp, Artificial Sequence
  Description of Artificial Sequence:  Enzymatic Nucleic acid
actgtatgggctagctacaacgaactcagag

SEQ ID NO: 6943 - DNA, 31 bp, Artificial Sequence
  Description of Artificial Sequence:  Enzymatic Nucleic acid
gcactgtaggctagctacaacgagcactcag

SEQ ID NO: 6944 - DNA, 31 bp, Artificial Sequence
  Description of Artificial Sequence:  Enzymatic Nucleic acid
tggcactgggctagctacaacgaatgcactc

SEQ ID NO: 6945 - DNA, 31 bp, Artificial Sequence
  Description of Artificial Sequence:  Enzymatic Nucleic acid
gggtggcaggctagctacaacgatgtatgca

SEQ ID NO: 6946 - DNA, 31 bp, Artificial Sequence
  Description of Artificial Sequence:  Enzymatic Nucleic acid
ctgggtggggctagctacaacgaactgtatg

SEQ ID NO: 6947 - DNA, 31 bp, Artificial Sequence
  Description of Artificial Sequence:  Enzymatic Nucleic acid
actctgggggctagctacaacgaggcactgt

SEQ ID NO: 6948 - DNA, 31 bp, Artificial Sequence
  Description of Artificial Sequence:  Enzymatic Nucleic acid
ggcaggcaggctagctacaacgatctgggtg

SEQ ID NO: 6949 - DNA, 31 bp, Artificial Sequence
  Description of Artificial Sequence:  Enzymatic Nucleic acid
gaggcaggggctagctacaacgaactctggg

SEQ ID NO: 6950 - DNA, 31 bp, Artificial Sequence
  Description of Artificial Sequence:  Enzymatic Nucleic acid
gcctgaggggctagctacaacgaaggcactc

SEQ ID NO: 6951 - DNA, 31 bp, Artificial Sequence
  Description of Artificial Sequence:  Enzymatic Nucleic acid
gttcatggggctagctacaacgactgaggca

SEQ ID NO: 6952 - DNA, 31 bp, Artificial Sequence
  Description of Artificial Sequence:  Enzymatic Nucleic acid
gatgttcaggctagctacaacgaggcctgag

SEQ ID NO: 6953 - DNA, 31 bp, Artificial Sequence
  Description of Artificial Sequence:  Enzymatic Nucleic acid
aggtgatgggctagctacaacgatcatggcc

SEQ ID NO: 6954 - DNA, 31 bp, Artificial Sequence
  Description of Artificial Sequence:  Enzymatic Nucleic acid
gcaggtgaggctagctacaacgagttcatgg

SEQ ID NO: 6955 - DNA, 31 bp, Artificial Sequence
  Description of Artificial Sequence:  Enzymatic Nucleic acid
tgtgcaggggctagctacaacgagatgttca

SEQ ID NO: 6956 - DNA, 31 bp, Artificial Sequence
  Description of Artificial Sequence:  Enzymatic Nucleic acid
gtcctgtgggctagctacaacgaaggtgatg

SEQ ID NO: 6957 - DNA, 31 bp, Artificial Sequence
  Description of Artificial Sequence:  Enzymatic Nucleic acid
ccgtcctgggctagctacaacgagcaggtga

SEQ ID NO: 6958 - DNA, 31 bp, Artificial Sequence
  Description of Artificial Sequence:  Enzymatic Nucleic acid
ggtccccgggctagctacaacgacctgtgca

SEQ ID NO: 6959 - DNA, 31 bp, Artificial Sequence
  Description of Artificial Sequence:  Enzymatic Nucleic acid
ttgtctggggctagctacaacgaccccgtcc

SEQ ID NO: 6960 - DNA, 31 bp, Artificial Sequence
  Description of Artificial Sequence:  Enzymatic Nucleic acid
tacagttgggctagctacaacgactggtccc

SEQ ID NO: 6961 - DNA, 31 bp, Artificial Sequence
  Description of Artificial Sequence:  Enzymatic Nucleic acid
ggatacagggctagctacaacgatgtctggt

SEQ ID NO: 6962 - DNA, 31 bp, Artificial Sequence
  Description of Artificial Sequence:  Enzymatic Nucleic acid
actggataggctagctacaacgaagttgtct

SEQ ID NO: 6963 - DNA, 31 bp, Artificial Sequence
  Description of Artificial Sequence:  Enzymatic Nucleic acid
acactggaggctagctacaacgaacagttgt

SEQ ID NO: 6964 - DNA, 31 bp, Artificial Sequence
  Description of Artificial Sequence:  Enzymatic Nucleic acid
tgggcacaggctagctacaacgatggataca

SEQ ID NO: 6965 - DNA, 31 bp, Artificial Sequence
  Description of Artificial Sequence:  Enzymatic Nucleic acid
agtgggcaggctagctacaacgaactggata

SEQ ID NO: 6966 - DNA, 31 bp, Artificial Sequence
  Description of Artificial Sequence:  Enzymatic Nucleic acid
gtagtgggggctagctacaacgaacactgga

SEQ ID NO: 6967 - DNA, 31 bp, Artificial Sequence
  Description of Artificial Sequence:  Enzymatic Nucleic acid
caatgtagggctagctacaacgagggcacac

SEQ ID NO: 6968 - DNA, 31 bp, Artificial Sequence
  Description of Artificial Sequence:  Enzymatic Nucleic acid
cgtcaatgggctagctacaacgaagtgggca

SEQ ID NO: 6969 - DNA, 31 bp, Artificial Sequence
  Description of Artificial Sequence:  Enzymatic Nucleic acid
gccgtcaaggctagctacaacgagtagtggg

SEQ ID NO: 6970 - DNA, 31 bp, Artificial Sequence
  Description of Artificial Sequence:  Enzymatic Nucleic acid
gggggccgggctagctacaacgacaatgtag

SEQ ID NO: 6971 - DNA, 31 bp, Artificial Sequence
  Description of Artificial Sequence:  Enzymatic Nucleic acid
agtgggggggctagctacaacgacgtcaatg

SEQ ID NO: 6972 - DNA, 31 bp, Artificial Sequence
  Description of Artificial Sequence:  Enzymatic Nucleic acid
tgacgcagggctagctacaacgagggggccg

SEQ ID NO: 6973 - DNA, 31 bp, Artificial Sequence
  Description of Artificial Sequence:  Enzymatic Nucleic acid
tcttgacgggctagctacaacgaagtggggg

SEQ ID NO: 6974 - DNA, 31 bp, Artificial Sequence
  Description of Artificial Sequence:  Enzymatic Nucleic acid
ggtcttgaggctagctacaacgagcagtggg

SEQ ID NO: 6975 - DNA, 31 bp, Artificial Sequence
  Description of Artificial Sequence:  Enzymatic Nucleic acid
cgggcaggggctagctacaacgacttgacgc

SEQ ID NO: 6976 - DNA, 31 bp, Artificial Sequence
  Description of Artificial Sequence:  Enzymatic Nucleic acid
ctgccgggggctagctacaacgaaggtcttg

SEQ ID NO: 6977 - DNA, 31 bp, Artificial Sequence
  Description of Artificial Sequence:  Enzymatic Nucleic acid
gactcctgggctagctacaacgacgggcagg

SEQ ID NO: 6978 - DNA, 31 bp, Artificial Sequence
  Description of Artificial Sequence:  Enzymatic Nucleic acid
tcccatgaggctagctacaacgatcctgccg

SEQ ID NO: 6979 - DNA, 31 bp, Artificial Sequence
  Description of Artificial Sequence:  Enzymatic Nucleic acid
ttctcccaggctagctacaacgagactcctg

SEQ ID NO: 6980 - DNA, 31 bp, Artificial Sequence
  Description of Artificial Sequence:  Enzymatic Nucleic acid
gggtgttgggctagctacaacgatttctccc

SEQ ID NO: 6981 - DNA, 31 bp, Artificial Sequence
  Description of Artificial Sequence:  Enzymatic Nucleic acid
ccagggtgggctagctacaacgatgttttct

SEQ ID NO: 6982 - DNA, 31 bp, Artificial Sequence
  Description of Artificial Sequence:  Enzymatic Nucleic acid
gaccagggggctagctacaacgagttgtttt

SEQ ID NO: 6983 - DNA, 31 bp, Artificial Sequence
  Description of Artificial Sequence:  Enzymatic Nucleic acid
cttccagaggctagctacaacgacagggtgt

SEQ ID NO: 6984 - DNA, 31 bp, Artificial Sequence
  Description of Artificial Sequence:  Enzymatic Nucleic acid
tctgcgtaggctagctacaacgattccagac

SEQ ID NO: 6985 - DNA, 31 bp, Artificial Sequence
  Description of Artificial Sequence:  Enzymatic Nucleic acid
cgtctgcgggctagctacaacgaacttccag

SEQ ID NO: 6986 - DNA, 31 bp, Artificial Sequence
  Description of Artificial Sequence:  Enzymatic Nucleic acid
ggcgtctgggctagctacaacgagtacttcc

SEQ ID NO: 6987 - DNA, 31 bp, Artificial Sequence
  Description of Artificial Sequence:  Enzymatic Nucleic acid
ggccggcgggctagctacaacgactgcgtac

SEQ ID NO: 6988 - DNA, 31 bp, Artificial Sequence
  Description of Artificial Sequence:  Enzymatic Nucleic acid
atggccggggctagctacaacgagtctgcgt

SEQ ID NO: 6989 - DNA, 31 bp, Artificial Sequence
  Description of Artificial Sequence:  Enzymatic Nucleic acid
acacatggggctagctacaacgacggcgtct

SEQ ID NO: 6990 - DNA, 31 bp, Artificial Sequence
  Description of Artificial Sequence:  Enzymatic Nucleic acid
ggcacacaggctagctacaacgaggccggcg

SEQ ID NO: 6991 - DNA, 31 bp, Artificial Sequence
  Description of Artificial Sequence:  Enzymatic Nucleic acid
gtggcacaggctagctacaacgaatggccgg

SEQ ID NO: 6992 - DNA, 31 bp, Artificial Sequence
  Description of Artificial Sequence:  Enzymatic Nucleic acid
aggtggcaggctagctacaacgaacatggcc

SEQ ID NO: 6993 - DNA, 31 bp, Artificial Sequence
  Description of Artificial Sequence:  Enzymatic Nucleic acid
acaggtggggctagctacaacgaacacatgg

SEQ ID NO: 6994 - DNA, 31 bp, Artificial Sequence
  Description of Artificial Sequence:  Enzymatic Nucleic acid
ggcacaggggctagctacaacgaggcacaca

SEQ ID NO: 6995 - DNA, 31 bp, Artificial Sequence
  Description of Artificial Sequence:  Enzymatic Nucleic acid
ggatggcaggctagctacaacgaaggtggca

SEQ ID NO: 6996 - DNA, 31 bp, Artificial Sequence
  Description of Artificial Sequence:  Enzymatic Nucleic acid
ttggatggggctagctacaacgaacaggtgg

SEQ ID NO: 6997 - DNA, 31 bp, Artificial Sequence
  Description of Artificial Sequence:  Enzymatic Nucleic acid
agtttggaggctagctacaacgaggcacagg

SEQ ID NO: 6998 - DNA, 31 bp, Artificial Sequence
  Description of Artificial Sequence:  Enzymatic Nucleic acid
aggtgcagggctagctacaacgattggatgg

SEQ ID NO: 6999 - DNA, 31 bp, Artificial Sequence
  Description of Artificial Sequence:  Enzymatic Nucleic acid
cgtaggtgggctagctacaacgaagtttgga

SEQ ID NO: 7000 - DNA, 31 bp, Artificial Sequence
  Description of Artificial Sequence:  Enzymatic Nucleic acid
tccgtaggggctagctacaacgagcagtttg

SEQ ID NO: 7001 - DNA, 31 bp, Artificial Sequence
  Description of Artificial Sequence:  Enzymatic Nucleic acid
tgcatccgggctagctacaacgaaggtgcag

SEQ ID NO: 7002 - DNA, 31 bp, Artificial Sequence
  Description of Artificial Sequence:  Enzymatic Nucleic acid
ccagtgcaggctagctacaacgaccgtaggt

SEQ ID NO: 7003 - DNA, 31 bp, Artificial Sequence
  Description of Artificial Sequence:  Enzymatic Nucleic acid
gcccagtgggctagctacaacgaatccgtag

SEQ ID NO: 7004 - DNA, 31 bp, Artificial Sequence
  Description of Artificial Sequence:  Enzymatic Nucleic acid
tggcccagggctagctacaacgagcatccgt

SEQ ID NO: 7005 - DNA, 31 bp, Artificial Sequence
  Description of Artificial Sequence:  Enzymatic Nucleic acid
agacctggggctagctacaacgaccagtgca

SEQ ID NO: 7006 - DNA, 31 bp, Artificial Sequence
  Description of Artificial Sequence:  Enzymatic Nucleic acid
cttcaagaggctagctacaacgactggccca

SEQ ID NO: 7007 - DNA, 31 bp, Artificial Sequence
  Description of Artificial Sequence:  Enzymatic Nucleic acid
ttggacagggctagctacaacgacttcaaga

SEQ ID NO: 7008 - DNA, 31 bp, Artificial Sequence
  Description of Artificial Sequence:  Enzymatic Nucleic acid
tcgttggaggctagctacaacgaagccttca

SEQ ID NO: 7009 - DNA, 31 bp, Artificial Sequence
  Description of Artificial Sequence:  Enzymatic Nucleic acid
cccattcgggctagctacaacgatggacagc

SEQ ID NO: 7010 - DNA, 31 bp, Artificial Sequence
  Description of Artificial Sequence:  Enzymatic Nucleic acid
taggcccaggctagctacaacgatcgttgga

SEQ ID NO: 7011 - DNA, 31 bp, Artificial Sequence
  Description of Artificial Sequence:  Enzymatic Nucleic acid
atcttaggggctagctacaacgaccattcgt

SEQ ID NO: 7012 - DNA, 31 bp, Artificial Sequence
  Description of Artificial Sequence:  Enzymatic Nucleic acid
ggacgggaggctagctacaacgacttaggcc

SEQ ID NO: 7013 - DNA, 31 bp, Artificial Sequence
  Description of Artificial Sequence:  Enzymatic Nucleic acid
gcgatggaggctagctacaacgagggatctt

SEQ ID NO: 7014 - DNA, 31 bp, Artificial Sequence
  Description of Artificial Sequence:  Enzymatic Nucleic acid
agtggcgaggctagctacaacgaggacggga

SEQ ID NO: 7015 - DNA, 31 bp, Artificial Sequence
  Description of Artificial Sequence:  Enzymatic Nucleic acid
cccagtggggctagctacaacgagatggacg

SEQ ID NO: 7016 - DNA, 31 bp, Artificial Sequence
  Description of Artificial Sequence:  Enzymatic Nucleic acid
catcccagggctagctacaacgaggcgatgg

SEQ ID NO: 7017 - DNA, 31 bp, Artificial Sequence
  Description of Artificial Sequence:  Enzymatic Nucleic acid
ccccaccaggctagctacaacgacccagtgg

SEQ ID NO: 7018 - DNA, 31 bp, Artificial Sequence
  Description of Artificial Sequence:  Enzymatic Nucleic acid
ggcccccaggctagctacaacgacatcccag

SEQ ID NO: 7019 - DNA, 31 bp, Artificial Sequence
  Description of Artificial Sequence:  Enzymatic Nucleic acid
gaggagggggctagctacaacgaccccacca

SEQ ID NO: 7020 - DNA, 31 bp, Artificial Sequence
  Description of Artificial Sequence:  Enzymatic Nucleic acid
accagcagggctagctacaacgaaagaggag

SEQ ID NO: 7021 - DNA, 31 bp, Artificial Sequence
  Description of Artificial Sequence:  Enzymatic Nucleic acid
accaccagggctagctacaacgaagcaagag

SEQ ID NO: 7022 - DNA, 31 bp, Artificial Sequence
  Description of Artificial Sequence:  Enzymatic Nucleic acid
ggccaccaggctagctacaacgacagcagca

SEQ ID NO: 7023 - DNA, 31 bp, Artificial Sequence
  Description of Artificial Sequence:  Enzymatic Nucleic acid
cagggccaggctagctacaacgacaccagca

SEQ ID NO: 7024 - DNA, 31 bp, Artificial Sequence
  Description of Artificial Sequence:  Enzymatic Nucleic acid
ccccagggggctagctacaacgacaccacca

SEQ ID NO: 7025 - DNA, 31 bp, Artificial Sequence
  Description of Artificial Sequence:  Enzymatic Nucleic acid
gaggccgaggctagctacaacgaccccaggg

SEQ ID NO: 7026 - DNA, 31 bp, Artificial Sequence
  Description of Artificial Sequence:  Enzymatic Nucleic acid
tgaagaggggctagctacaacgacgatcccc

SEQ ID NO: 7027 - DNA, 31 bp, Artificial Sequence
  Description of Artificial Sequence:  Enzymatic Nucleic acid
ccttcgcaggctagctacaacgagaagaggc

SEQ ID NO: 7028 - DNA, 31 bp, Artificial Sequence
  Description of Artificial Sequence:  Enzymatic Nucleic acid
cgccttcgggctagctacaacgaatgaagag

SEQ ID NO: 7029 - DNA, 31 bp, Artificial Sequence
  Description of Artificial Sequence:  Enzymatic Nucleic acid
atgtggcgggctagctacaacgacttcgcat

SEQ ID NO: 7030 - DNA, 31 bp, Artificial Sequence
  Description of Artificial Sequence:  Enzymatic Nucleic acid
cgatgtggggctagctacaacgagccttcgc

SEQ ID NO: 7031 - DNA, 31 bp, Artificial Sequence
  Description of Artificial Sequence:  Enzymatic Nucleic acid
gaacgatgggctagctacaacgaggcgcctt

SEQ ID NO: 7032 - DNA, 31 bp, Artificial Sequence
  Description of Artificial Sequence:  Enzymatic Nucleic acid
ccgaacgaggctagctacaacgagtggcgcc

SEQ ID NO: 7033 - DNA, 31 bp, Artificial Sequence
  Description of Artificial Sequence:  Enzymatic Nucleic acid
cttccgaaggctagctacaacgagatgtggc

SEQ ID NO: 7034 - DNA, 31 bp, Artificial Sequence
  Description of Artificial Sequence:  Enzymatic Nucleic acid
agcgtgcgggctagctacaacgattccgaac

SEQ ID NO: 7035 - DNA, 31 bp, Artificial Sequence
  Description of Artificial Sequence:  Enzymatic Nucleic acid
gcagcgtgggctagctacaacgagcttccga

SEQ ID NO: 7036 - DNA, 31 bp, Artificial Sequence
  Description of Artificial Sequence:  Enzymatic Nucleic acid
ccgcagcgggctagctacaacgagcgcttcc

SEQ ID NO: 7037 - DNA, 31 bp, Artificial Sequence
  Description of Artificial Sequence:  Enzymatic Nucleic acid
ctccgcagggctagctacaacgagtgcgctt

SEQ ID NO: 7038 - DNA, 31 bp, Artificial Sequence
  Description of Artificial Sequence:  Enzymatic Nucleic acid
agcctccgggctagctacaacgaagcgtgcg

SEQ ID NO: 7039 - DNA, 31 bp, Artificial Sequence
  Description of Artificial Sequence:  Enzymatic Nucleic acid
tgcagcagggctagctacaacgactccgcag

SEQ ID NO: 7040 - DNA, 31 bp, Artificial Sequence
  Description of Artificial Sequence:  Enzymatic Nucleic acid
tcctgcagggctagctacaacgaagcctccg

SEQ ID NO: 7041 - DNA, 31 bp, Artificial Sequence
  Description of Artificial Sequence:  Enzymatic Nucleic acid
ctctcctgggctagctacaacgaagcagcct

SEQ ID NO: 7042 - DNA, 31 bp, Artificial Sequence
  Description of Artificial Sequence:  Enzymatic Nucleic acid
tccacaagggctagctacaacgatccctctc

SEQ ID NO: 7043 - DNA, 31 bp, Artificial Sequence
  Description of Artificial Sequence:  Enzymatic Nucleic acid
aggctccaggctagctacaacgaaagctccc

SEQ ID NO: 7044 - DNA, 31 bp, Artificial Sequence
  Description of Artificial Sequence:  Enzymatic Nucleic acid
gtaagaggggctagctacaacgatccacaag

SEQ ID NO: 7045 - DNA, 31 bp, Artificial Sequence
  Description of Artificial Sequence:  Enzymatic Nucleic acid
actgggtgggctagctacaacgaaagaggct

SEQ ID NO: 7046 - DNA, 31 bp, Artificial Sequence
  Description of Artificial Sequence:  Enzymatic Nucleic acid
ccactgggggctagctacaacgagtaagagg

SEQ ID NO: 7047 - DNA, 31 bp, Artificial Sequence
  Description of Artificial Sequence:  Enzymatic Nucleic acid
cttctccaggctagctacaacgatgggtgta

SEQ ID NO: 7048 - DNA, 31 bp, Artificial Sequence
  Description of Artificial Sequence:  Enzymatic Nucleic acid
gttgggagggctagctacaacgattctccac

SEQ ID NO: 7049 - DNA, 31 bp, Artificial Sequence
  Description of Artificial Sequence:  Enzymatic Nucleic acid
gagcttggggctagctacaacgatgggagct

SEQ ID NO: 7050 - DNA, 31 bp, Artificial Sequence
  Description of Artificial Sequence:  Enzymatic Nucleic acid
caagagagggctagctacaacgattggttgg

SEQ ID NO: 7051 - DNA, 31 bp, Artificial Sequence
  Description of Artificial Sequence:  Enzymatic Nucleic acid
cttcaagaggctagctacaacgacctcaaga

SEQ ID NO: 7052 - DNA, 31 bp, Artificial Sequence
  Description of Artificial Sequence:  Enzymatic Nucleic acid
gaattcagggctagctacaacgattccttca

SEQ ID NO: 7053 - DNA, 31 bp, Artificial Sequence
  Description of Artificial Sequence:  Enzymatic Nucleic acid
tttttgaaggctagctacaacgatcagtttc

SEQ ID NO: 7054 - DNA, 31 bp, Artificial Sequence
  Description of Artificial Sequence:  Enzymatic Nucleic acid
cactttgaggctagctacaacgactttttga

SEQ ID NO: 7055 - DNA, 31 bp, Artificial Sequence
  Description of Artificial Sequence:  Enzymatic Nucleic acid
gcccagcaggctagctacaacgatttgatct

SEQ ID NO: 7056 - DNA, 31 bp, Artificial Sequence
  Description of Artificial Sequence:  Enzymatic Nucleic acid
gagcccagggctagctacaacgaactttgat

SEQ ID NO: 7057 - DNA, 31 bp, Artificial Sequence
  Description of Artificial Sequence:  Enzymatic Nucleic acid
caccggagggctagctacaacgaccagcact

SEQ ID NO: 7058 - DNA, 31 bp, Artificial Sequence
  Description of Artificial Sequence:  Enzymatic Nucleic acid
cgaacgcaggctagctacaacgacggagccc

SEQ ID NO: 7059 - DNA, 31 bp, Artificial Sequence
  Description of Artificial Sequence:  Enzymatic Nucleic acid
gccgaacgggctagctacaacgaaccggagc

SEQ ID NO: 7060 - DNA, 31 bp, Artificial Sequence
  Description of Artificial Sequence:  Enzymatic Nucleic acid
gtgccgaaggctagctacaacgagcaccgga

SEQ ID NO: 7061 - DNA, 31 bp, Artificial Sequence
  Description of Artificial Sequence:  Enzymatic Nucleic acid
acaccgtgggctagctacaacgacgaacgca

SEQ ID NO: 7062 - DNA, 31 bp, Artificial Sequence
  Description of Artificial Sequence:  Enzymatic Nucleic acid
atacaccgggctagctacaacgagccgaacg

SEQ ID NO: 7063 - DNA, 31 bp, Artificial Sequence
  Description of Artificial Sequence:  Enzymatic Nucleic acid
cttatacaggctagctacaacgacgtgccga

SEQ ID NO: 7064 - DNA, 31 bp, Artificial Sequence
  Description of Artificial Sequence:  Enzymatic Nucleic acid
cccttataggctagctacaacgaaccgtgcc

SEQ ID NO: 7065 - DNA, 31 bp, Artificial Sequence
  Description of Artificial Sequence:  Enzymatic Nucleic acid
gtcccttaggctagctacaacgaacaccgtg

SEQ ID NO: 7066 - DNA, 31 bp, Artificial Sequence
  Description of Artificial Sequence:  Enzymatic Nucleic acid
atccagagggctagctacaacgacccttata

SEQ ID NO: 7067 - DNA, 31 bp, Artificial Sequence
  Description of Artificial Sequence:  Enzymatic Nucleic acid
ttctgggaggctagctacaacgaccagagtc

SEQ ID NO: 7068 - DNA, 31 bp, Artificial Sequence
  Description of Artificial Sequence:  Enzymatic Nucleic acid
ctttctcaggctagctacaacgacttctggg

SEQ ID NO: 7069 - DNA, 31 bp, Artificial Sequence
  Description of Artificial Sequence:  Enzymatic Nucleic acid
aattttaaggctagctacaacgatttctcac

SEQ ID NO: 7070 - DNA, 31 bp, Artificial Sequence
  Description of Artificial Sequence:  Enzymatic Nucleic acid
gacgggaaggctagctacaacgatttaactt

SEQ ID NO: 7071 - DNA, 31 bp, Artificial Sequence
  Description of Artificial Sequence:  Enzymatic Nucleic acid
gatagcgaggctagctacaacgagggaattt

SEQ ID NO: 7072 - DNA, 31 bp, Artificial Sequence
  Description of Artificial Sequence:  Enzymatic Nucleic acid
cttgatagggctagctacaacgagacgggaa

SEQ ID NO: 7073 - DNA, 31 bp, Artificial Sequence
  Description of Artificial Sequence:  Enzymatic Nucleic acid
ttccttgaggctagctacaacgaagcgacgg

SEQ ID NO: 7074 - DNA, 31 bp, Artificial Sequence
  Description of Artificial Sequence:  Enzymatic Nucleic acid
tctcttaaggctagctacaacgatccttgat

SEQ ID NO: 7075 - DNA, 31 bp, Artificial Sequence
  Description of Artificial Sequence:  Enzymatic Nucleic acid
agatgttgggctagctacaacgattctctta

SEQ ID NO: 7076 - DNA, 31 bp, Artificial Sequence
  Description of Artificial Sequence:  Enzymatic Nucleic acid
cggagatgggctagctacaacgatgcttctc

SEQ ID NO: 7077 - DNA, 31 bp, Artificial Sequence
  Description of Artificial Sequence:  Enzymatic Nucleic acid
ttcggagaggctagctacaacgagttgcttc

SEQ ID NO: 7078 - DNA, 31 bp, Artificial Sequence
  Description of Artificial Sequence:  Enzymatic Nucleic acid
cttgttggggctagctacaacgatttcggag

SEQ ID NO: 7079 - DNA, 31 bp, Artificial Sequence
  Description of Artificial Sequence:  Enzymatic Nucleic acid
tttccttgggctagctacaacgatggctttc

SEQ ID NO: 7080 - DNA, 31 bp, Artificial Sequence
  Description of Artificial Sequence:  Enzymatic Nucleic acid
atcgaggaggctagctacaacgattccttgt

SEQ ID NO: 7081 - DNA, 31 bp, Artificial Sequence
  Description of Artificial Sequence:  Enzymatic Nucleic acid
aggcttcaggctagctacaacgacgaggatt

SEQ ID NO: 7082 - DNA, 31 bp, Artificial Sequence
  Description of Artificial Sequence:  Enzymatic Nucleic acid
cacgtaggggctagctacaacgattcatcga

SEQ ID NO: 7083 - DNA, 31 bp, Artificial Sequence
  Description of Artificial Sequence:  Enzymatic Nucleic acid
ccatcacgggctagctacaacgaaggcttca

SEQ ID NO: 7084 - DNA, 31 bp, Artificial Sequence
  Description of Artificial Sequence:  Enzymatic Nucleic acid
ggccatcaggctagctacaacgagtaggctt

SEQ ID NO: 7085 - DNA, 31 bp, Artificial Sequence
  Description of Artificial Sequence:  Enzymatic Nucleic acid
gctggccaggctagctacaacgacacgtagg

SEQ ID NO: 7086 - DNA, 31 bp, Artificial Sequence
  Description of Artificial Sequence:  Enzymatic Nucleic acid
cacgctggggctagctacaacgacatcacgt

SEQ ID NO: 7087 - DNA, 31 bp, Artificial Sequence
  Description of Artificial Sequence:  Enzymatic Nucleic acid
tgtccacgggctagctacaacgatggccatc

SEQ ID NO: 7088 - DNA, 31 bp, Artificial Sequence
  Description of Artificial Sequence:  Enzymatic Nucleic acid
gttgtccaggctagctacaacgagctggcca

SEQ ID NO: 7089 - DNA, 31 bp, Artificial Sequence
  Description of Artificial Sequence:  Enzymatic Nucleic acid
gggggttgggctagctacaacgaccacgctg

SEQ ID NO: 7090 - DNA, 31 bp, Artificial Sequence
  Description of Artificial Sequence:  Enzymatic Nucleic acid
cgtgggggggctagctacaacgatgtccacg

SEQ ID NO: 7091 - DNA, 31 bp, Artificial Sequence
  Description of Artificial Sequence:  Enzymatic Nucleic acid
ggcacacgggctagctacaacgagggggttg

SEQ ID NO: 7092 - DNA, 31 bp, Artificial Sequence
  Description of Artificial Sequence:  Enzymatic Nucleic acid
gcggcacaggctagctacaacgagtgggggt

SEQ ID NO: 7093 - DNA, 31 bp, Artificial Sequence
  Description of Artificial Sequence:  Enzymatic Nucleic acid
aggcggcaggctagctacaacgaacgtgggg

SEQ ID NO: 7094 - DNA, 31 bp, Artificial Sequence
  Description of Artificial Sequence:  Enzymatic Nucleic acid
gcaggcggggctagctacaacgaacacgtgg

SEQ ID NO: 7095 - DNA, 31 bp, Artificial Sequence
  Description of Artificial Sequence:  Enzymatic Nucleic acid
ccagcaggggctagctacaacgaggcacacg

SEQ ID NO: 7096 - DNA, 31 bp, Artificial Sequence
  Description of Artificial Sequence:  Enzymatic Nucleic acid
atgcccagggctagctacaacgaaggcggca

SEQ ID NO: 7097 - DNA, 31 bp, Artificial Sequence
  Description of Artificial Sequence:  Enzymatic Nucleic acid
ggcagatgggctagctacaacgaccagcagg

SEQ ID NO: 7098 - DNA, 31 bp, Artificial Sequence
  Description of Artificial Sequence:  Enzymatic Nucleic acid
gaggcagaggctagctacaacgagcccagca

SEQ ID NO: 7099 - DNA, 31 bp, Artificial Sequence
  Description of Artificial Sequence:  Enzymatic Nucleic acid
aggtgaggggctagctacaacgaagatgccc

SEQ ID NO: 7100 - DNA, 31 bp, Artificial Sequence
  Description of Artificial Sequence:  Enzymatic Nucleic acid
ggtggaggggctagctacaacgagaggcaga

SEQ ID NO: 7101 - DNA, 31 bp, Artificial Sequence
  Description of Artificial Sequence:  Enzymatic Nucleic acid
ttgcacggggctagctacaacgaggaggtga

SEQ ID NO: 7102 - DNA, 31 bp, Artificial Sequence
  Description of Artificial Sequence:  Enzymatic Nucleic acid
gagttgcaggctagctacaacgaggtggagg

SEQ ID NO: 7103 - DNA, 31 bp, Artificial Sequence
  Description of Artificial Sequence:  Enzymatic Nucleic acid
atgagttgggctagctacaacgaacggtgga

SEQ ID NO: 7104 - DNA, 31 bp, Artificial Sequence
  Description of Artificial Sequence:  Enzymatic Nucleic acid
gtgatgagggctagctacaacgatgcacggt

SEQ ID NO: 7105 - DNA, 31 bp, Artificial Sequence
  Description of Artificial Sequence:  Enzymatic Nucleic acid
ctgcgtgaggctagctacaacgagagttgca

SEQ ID NO: 7106 - DNA, 31 bp, Artificial Sequence
  Description of Artificial Sequence:  Enzymatic Nucleic acid
gagctgcgggctagctacaacgagatgagtt

SEQ ID NO: 7107 - DNA, 31 bp, Artificial Sequence
  Description of Artificial Sequence:  Enzymatic Nucleic acid
atgagctgggctagctacaacgagtgatgag

SEQ ID NO: 7108 - DNA, 31 bp, Artificial Sequence
  Description of Artificial Sequence:  Enzymatic Nucleic acid
ggcatgagggctagctacaacgatgcgtgat

SEQ ID NO: 7109 - DNA, 31 bp, Artificial Sequence
  Description of Artificial Sequence:  Enzymatic Nucleic acid
gaagggcaggctagctacaacgagagctgcg

SEQ ID NO: 7110 - DNA, 31 bp, Artificial Sequence
  Description of Artificial Sequence:  Enzymatic Nucleic acid
ccgaagggggctagctacaacgaatgagctg

SEQ ID NO: 7111 - DNA, 31 bp, Artificial Sequence
  Description of Artificial Sequence:  Enzymatic Nucleic acid
ggaggcagggctagctacaacgacgaagggc

SEQ ID NO: 7112 - DNA, 31 bp, Artificial Sequence
  Description of Artificial Sequence:  Enzymatic Nucleic acid
ccaggaggggctagctacaacgaagccgaag

SEQ ID NO: 7113 - DNA, 31 bp, Artificial Sequence
  Description of Artificial Sequence:  Enzymatic Nucleic acid
ggacatagggctagctacaacgaccaggagg

SEQ ID NO: 7114 - DNA, 31 bp, Artificial Sequence
  Description of Artificial Sequence:  Enzymatic Nucleic acid
cccggacaggctagctacaacgaagtccagg

SEQ ID NO: 7115 - DNA, 31 bp, Artificial Sequence
  Description of Artificial Sequence:  Enzymatic Nucleic acid
ttcccggaggctagctacaacgaatagtcca

SEQ ID NO: 7116 - DNA, 31 bp, Artificial Sequence
  Description of Artificial Sequence:  Enzymatic Nucleic acid
tctttgtgggctagctacaacgatcccggac

SEQ ID NO: 7117 - DNA, 31 bp, Artificial Sequence
  Description of Artificial Sequence:  Enzymatic Nucleic acid
tgtctttgggctagctacaacgagttcccgg

SEQ ID NO: 7118 - DNA, 31 bp, Artificial Sequence
  Description of Artificial Sequence:  Enzymatic Nucleic acid
caatattgggctagctacaacgactttgtgt

SEQ ID NO: 7119 - DNA, 31 bp, Artificial Sequence
  Description of Artificial Sequence:  Enzymatic Nucleic acid
agccaataggctagctacaacgatgtctttg

SEQ ID NO: 7120 - DNA, 31 bp, Artificial Sequence
  Description of Artificial Sequence:  Enzymatic Nucleic acid
ggagccaaggctagctacaacgaattgtctt

SEQ ID NO: 7121 - DNA, 31 bp, Artificial Sequence
  Description of Artificial Sequence:  Enzymatic Nucleic acid
actgggagggctagctacaacgacaatattg

SEQ ID NO: 7122 - DNA, 31 bp, Artificial Sequence
  Description of Artificial Sequence:  Enzymatic Nucleic acid
agcaggtaggctagctacaacgatgggagcc

SEQ ID NO: 7123 - DNA, 31 bp, Artificial Sequence
  Description of Artificial Sequence:  Enzymatic Nucleic acid
tgagcaggggctagctacaacgaactgggag

SEQ ID NO: 7124 - DNA, 31 bp, Artificial Sequence
  Description of Artificial Sequence:  Enzymatic Nucleic acid
cagttgagggctagctacaacgaaggtactg

SEQ ID NO: 7125 - DNA, 31 bp, Artificial Sequence
  Description of Artificial Sequence:  Enzymatic Nucleic acid
cacaccagggctagctacaacgatgagcagg

SEQ ID NO: 7126 - DNA, 31 bp, Artificial Sequence
  Description of Artificial Sequence:  Enzymatic Nucleic acid
tgcacacaggctagctacaacgacagttgag

SEQ ID NO: 7127 - DNA, 31 bp, Artificial Sequence
  Description of Artificial Sequence:  Enzymatic Nucleic acid
tctgcacaggctagctacaacgaaccagttg

SEQ ID NO: 7128 - DNA, 31 bp, Artificial Sequence
  Description of Artificial Sequence:  Enzymatic Nucleic acid
gatctgcaggctagctacaacgaacaccagt

SEQ ID NO: 7129 - DNA, 31 bp, Artificial Sequence
  Description of Artificial Sequence:  Enzymatic Nucleic acid
gcgatctgggctagctacaacgaacacacca

SEQ ID NO: 7130 - DNA, 31 bp, Artificial Sequence
  Description of Artificial Sequence:  Enzymatic Nucleic acid
ctttgcgaggctagctacaacgactgcacac

SEQ ID NO: 7131 - DNA, 31 bp, Artificial Sequence
  Description of Artificial Sequence:  Enzymatic Nucleic acid
gccctttgggctagctacaacgagatctgca

SEQ ID NO: 7132 - DNA, 31 bp, Artificial Sequence
  Description of Artificial Sequence:  Enzymatic Nucleic acid
agttcatgggctagctacaacgacctttgcg

SEQ ID NO: 7133 - DNA, 31 bp, Artificial Sequence
  Description of Artificial Sequence:  Enzymatic Nucleic acid
gtagttcaggctagctacaacgagccctttg

SEQ ID NO: 7134 - DNA, 31 bp, Artificial Sequence
  Description of Artificial Sequence:  Enzymatic Nucleic acid
ccaagtagggctagctacaacgatcatgccc

SEQ ID NO: 7135 - DNA, 31 bp, Artificial Sequence
  Description of Artificial Sequence:  Enzymatic Nucleic acid
cctccaagggctagctacaacgaagttcatg

SEQ ID NO: 7136 - DNA, 31 bp, Artificial Sequence
  Description of Artificial Sequence:  Enzymatic Nucleic acid
agcgacggggctagctacaacgacctccaag

SEQ ID NO: 7137 - DNA, 31 bp, Artificial Sequence
  Description of Artificial Sequence:  Enzymatic Nucleic acid
ccaagcgaggctagctacaacgaggtcctcc

SEQ ID NO: 7138 - DNA, 31 bp, Artificial Sequence
  Description of Artificial Sequence:  Enzymatic Nucleic acid
gcaccaagggctagctacaacgagacggtcc

SEQ ID NO: 7139 - DNA, 31 bp, Artificial Sequence
  Description of Artificial Sequence:  Enzymatic Nucleic acid
gcggtgcaggctagctacaacgacaagcgac

SEQ ID NO: 7140 - DNA, 31 bp, Artificial Sequence
  Description of Artificial Sequence:  Enzymatic Nucleic acid
tcgcggtgggctagctacaacgaaccaagcg

SEQ ID NO: 7141 - DNA, 31 bp, Artificial Sequence
  Description of Artificial Sequence:  Enzymatic Nucleic acid
ggtcgcggggctagctacaacgagcaccaag

SEQ ID NO: 7142 - DNA, 31 bp, Artificial Sequence
  Description of Artificial Sequence:  Enzymatic Nucleic acid
ccaggtcgggctagctacaacgaggtgcacc

SEQ ID NO: 7143 - DNA, 31 bp, Artificial Sequence
  Description of Artificial Sequence:  Enzymatic Nucleic acid
ctgccaggggctagctacaacgacgcggtgc

SEQ ID NO: 7144 - DNA, 31 bp, Artificial Sequence
  Description of Artificial Sequence:  Enzymatic Nucleic acid
cctggctgggctagctacaacgacaggtcgc

SEQ ID NO: 7145 - DNA, 31 bp, Artificial Sequence
  Description of Artificial Sequence:  Enzymatic Nucleic acid
gttcctggggctagctacaacgatgccaggt

SEQ ID NO: 7146 - DNA, 31 bp, Artificial Sequence
  Description of Artificial Sequence:  Enzymatic Nucleic acid
ccagtacgggctagctacaacgatcctggct

SEQ ID NO: 7147 - DNA, 31 bp, Artificial Sequence
  Description of Artificial Sequence:  Enzymatic Nucleic acid
caccagtaggctagctacaacgagttcctgg

SEQ ID NO: 7148 - DNA, 31 bp, Artificial Sequence
  Description of Artificial Sequence:  Enzymatic Nucleic acid
ttcaccagggctagctacaacgaacgttcct

SEQ ID NO: 7149 - DNA, 31 bp, Artificial Sequence
  Description of Artificial Sequence:  Enzymatic Nucleic acid
tgttttcaggctagctacaacgacagtacgt

SEQ ID NO: 7150 - DNA, 31 bp, Artificial Sequence
  Description of Artificial Sequence:  Enzymatic Nucleic acid
ctgcggtgggctagctacaacgatttcacca

SEQ ID NO: 7151 - DNA, 31 bp, Artificial Sequence
  Description of Artificial Sequence:  Enzymatic Nucleic acid
tgctgcggggctagctacaacgagttttcac

SEQ ID NO: 7152 - DNA, 31 bp, Artificial Sequence
  Description of Artificial Sequence:  Enzymatic Nucleic acid
acatgctgggctagctacaacgaggtgtttt

SEQ ID NO: 7153 - DNA, 31 bp, Artificial Sequence
  Description of Artificial Sequence:  Enzymatic Nucleic acid
ttgacatgggctagctacaacgatgcggtgt

SEQ ID NO: 7154 - DNA, 31 bp, Artificial Sequence
  Description of Artificial Sequence:  Enzymatic Nucleic acid
tcttgacaggctagctacaacgagctgcggt

SEQ ID NO: 7155 - DNA, 31 bp, Artificial Sequence
  Description of Artificial Sequence:  Enzymatic Nucleic acid
gatcttgaggctagctacaacgaatgctgcg

SEQ ID NO: 7156 - DNA, 31 bp, Artificial Sequence
  Description of Artificial Sequence:  Enzymatic Nucleic acid
atctgtgaggctagctacaacgacttgacat

SEQ ID NO: 7157 - DNA, 31 bp, Artificial Sequence
  Description of Artificial Sequence:  Enzymatic Nucleic acid
aaaatctgggctagctacaacgagatcttga

SEQ ID NO: 7158 - DNA, 31 bp, Artificial Sequence
  Description of Artificial Sequence:  Enzymatic Nucleic acid
gcccaaaaggctagctacaacgactgtgatc

SEQ ID NO: 7159 - DNA, 31 bp, Artificial Sequence
  Description of Artificial Sequence:  Enzymatic Nucleic acid
ttggccagggctagctacaacgaccaaaatc

SEQ ID NO: 7160 - DNA, 31 bp, Artificial Sequence
  Description of Artificial Sequence:  Enzymatic Nucleic acid
cagtttggggctagctacaacgacagcccaa

SEQ ID NO: 7161 - DNA, 31 bp, Artificial Sequence
  Description of Artificial Sequence:  Enzymatic Nucleic acid
cccagcagggctagctacaacgattggccag

SEQ ID NO: 7162 - DNA, 31 bp, Artificial Sequence
  Description of Artificial Sequence:  Enzymatic Nucleic acid
gcacccagggctagctacaacgaagtttggc

SEQ ID NO: 7163 - DNA, 31 bp, Artificial Sequence
  Description of Artificial Sequence:  Enzymatic Nucleic acid
cttccgcaggctagctacaacgaccagcagt

SEQ ID NO: 7164 - DNA, 31 bp, Artificial Sequence
  Description of Artificial Sequence:  Enzymatic Nucleic acid
ctcttccgggctagctacaacgaacccagca

SEQ ID NO: 7165 - DNA, 31 bp, Artificial Sequence
  Description of Artificial Sequence:  Enzymatic Nucleic acid
gcatggtaggctagctacaacgatctttctc

SEQ ID NO: 7166 - DNA, 31 bp, Artificial Sequence
  Description of Artificial Sequence:  Enzymatic Nucleic acid
ctgcatggggctagctacaacgaattctttc

SEQ ID NO: 7167 - DNA, 31 bp, Artificial Sequence
  Description of Artificial Sequence:  Enzymatic Nucleic acid
cttctgcaggctagctacaacgaggtattct

SEQ ID NO: 7168 - DNA, 31 bp, Artificial Sequence
  Description of Artificial Sequence:  Enzymatic Nucleic acid
tccttctgggctagctacaacgaatggtatt

SEQ ID NO: 7169 - DNA, 31 bp, Artificial Sequence
  Description of Artificial Sequence:  Enzymatic Nucleic acid
gcactttgggctagctacaacgactccttct

SEQ ID NO: 7170 - DNA, 31 bp, Artificial Sequence
  Description of Artificial Sequence:  Enzymatic Nucleic acid
gataggcaggctagctacaacgatttgcctc

SEQ ID NO: 7171 - DNA, 31 bp, Artificial Sequence
  Description of Artificial Sequence:  Enzymatic Nucleic acid
ttgataggggctagctacaacgaactttgcc

SEQ ID NO: 7172 - DNA, 31 bp, Artificial Sequence
  Description of Artificial Sequence:  Enzymatic Nucleic acid
ccacttgaggctagctacaacgaaggcactt

SEQ ID NO: 7173 - DNA, 31 bp, Artificial Sequence
  Description of Artificial Sequence:  Enzymatic Nucleic acid
gccatccaggctagctacaacgattgatagg

SEQ ID NO: 7174 - DNA, 31 bp, Artificial Sequence
  Description of Artificial Sequence:  Enzymatic Nucleic acid
caatgccaggctagctacaacgaccacttga

SEQ ID NO: 7175 - DNA, 31 bp, Artificial Sequence
  Description of Artificial Sequence:  Enzymatic Nucleic acid
ttccaatgggctagctacaacgacatccact

SEQ ID NO: 7176 - DNA, 31 bp, Artificial Sequence
  Description of Artificial Sequence:  Enzymatic Nucleic acid
gattccaaggctagctacaacgagccatcca

SEQ ID NO: 7177 - DNA, 31 bp, Artificial Sequence
  Description of Artificial Sequence:  Enzymatic Nucleic acid
aaaattgaggctagctacaacgatccaatgc

SEQ ID NO: 7178 - DNA, 31 bp, Artificial Sequence
  Description of Artificial Sequence:  Enzymatic Nucleic acid
gtgtaaaaggctagctacaacgatgattcca

SEQ ID NO: 7179 - DNA, 31 bp, Artificial Sequence
  Description of Artificial Sequence:  Enzymatic Nucleic acid
attctgtgggctagctacaacgaaaaattga

SEQ ID NO: 7180 - DNA, 31 bp, Artificial Sequence
  Description of Artificial Sequence:  Enzymatic Nucleic acid
agattctgggctagctacaacgagtaaaatt

SEQ ID NO: 7181 - DNA, 31 bp, Artificial Sequence
  Description of Artificial Sequence:  Enzymatic Nucleic acid
ggtatagaggctagctacaacgatctgtgta

SEQ ID NO: 7182 - DNA, 31 bp, Artificial Sequence
  Description of Artificial Sequence:  Enzymatic Nucleic acid
ggtgggtaggctagctacaacgaagattctg

SEQ ID NO: 7183 - DNA, 31 bp, Artificial Sequence
  Description of Artificial Sequence:  Enzymatic Nucleic acid
ctggtgggggctagctacaacgaatagattc

SEQ ID NO: 7184 - DNA, 31 bp, Artificial Sequence
  Description of Artificial Sequence:  Enzymatic Nucleic acid
cactctggggctagctacaacgagggtatag

SEQ ID NO: 7185 - DNA, 31 bp, Artificial Sequence
  Description of Artificial Sequence:  Enzymatic Nucleic acid
agacatcaggctagctacaacgatctggtgg

SEQ ID NO: 7186 - DNA, 31 bp, Artificial Sequence
  Description of Artificial Sequence:  Enzymatic Nucleic acid
tccagacaggctagctacaacgacactctgg

SEQ ID NO: 7187 - DNA, 31 bp, Artificial Sequence
  Description of Artificial Sequence:  Enzymatic Nucleic acid
gctccagaggctagctacaacgaatcactct

SEQ ID NO: 7188 - DNA, 31 bp, Artificial Sequence
  Description of Artificial Sequence:  Enzymatic Nucleic acid
ccccgtagggctagctacaacgatccagaca

SEQ ID NO: 7189 - DNA, 31 bp, Artificial Sequence
  Description of Artificial Sequence:  Enzymatic Nucleic acid
tcaccccgggctagctacaacgaagctccag

SEQ ID NO: 7190 - DNA, 31 bp, Artificial Sequence
  Description of Artificial Sequence:  Enzymatic Nucleic acid
aacggtcaggctagctacaacgacccgtagc

SEQ ID NO: 7191 - DNA, 31 bp, Artificial Sequence
  Description of Artificial Sequence:  Enzymatic Nucleic acid
ccaaacggggctagctacaacgacaccccgt

SEQ ID NO: 7192 - DNA, 31 bp, Artificial Sequence
  Description of Artificial Sequence:  Enzymatic Nucleic acid
ctcccaaaggctagctacaacgaggtcaccc

SEQ ID NO: 7193 - DNA, 31 bp, Artificial Sequence
  Description of Artificial Sequence:  Enzymatic Nucleic acid
gtcatcaaggctagctacaacgatcccaaac

SEQ ID NO: 7194 - DNA, 31 bp, Artificial Sequence
  Description of Artificial Sequence:  Enzymatic Nucleic acid
aaaggtcaggctagctacaacgacaactccc

SEQ ID NO: 7195 - DNA, 31 bp, Artificial Sequence
  Description of Artificial Sequence:  Enzymatic Nucleic acid
tccaaaggggctagctacaacgacatcaact

SEQ ID NO: 7196 - DNA, 31 bp, Artificial Sequence
  Description of Artificial Sequence:  Enzymatic Nucleic acid
ggcttggaggctagctacaacgaccaaaggt

SEQ ID NO: 7197 - DNA, 31 bp, Artificial Sequence
  Description of Artificial Sequence:  Enzymatic Nucleic acid
tcatatggggctagctacaacgattggatcc

SEQ ID NO: 7198 - DNA, 31 bp, Artificial Sequence
  Description of Artificial Sequence:  Enzymatic Nucleic acid
ccgtcataggctagctacaacgaggcttgga

SEQ ID NO: 7199 - DNA, 31 bp, Artificial Sequence
  Description of Artificial Sequence:  Enzymatic Nucleic acid
ttccgtcaggctagctacaacgaatggcttg

SEQ ID NO: 7200 - DNA, 31 bp, Artificial Sequence
  Description of Artificial Sequence:  Enzymatic Nucleic acid
ggattccgggctagctacaacgacatatggc

SEQ ID NO: 7201 - DNA, 31 bp, Artificial Sequence
  Description of Artificial Sequence:  Enzymatic Nucleic acid
ggcagggaggctagctacaacgatccgtcat

SEQ ID NO: 7202 - DNA, 31 bp, Artificial Sequence
  Description of Artificial Sequence:  Enzymatic Nucleic acid
ctcgctggggctagctacaacgaagggattc

SEQ ID NO: 7203 - DNA, 31 bp, Artificial Sequence
  Description of Artificial Sequence:  Enzymatic Nucleic acid
agatctcgggctagctacaacgatggcaggg

SEQ ID NO: 7204 - DNA, 31 bp, Artificial Sequence
  Description of Artificial Sequence:  Enzymatic Nucleic acid
ggaggagaggctagctacaacgactcgctgg

SEQ ID NO: 7205 - DNA, 31 bp, Artificial Sequence
  Description of Artificial Sequence:  Enzymatic Nucleic acid
ctccaggaggctagctacaacgaggaggaga

SEQ ID NO: 7206 - DNA, 31 bp, Artificial Sequence
  Description of Artificial Sequence:  Enzymatic Nucleic acid
gggaggcgggctagctacaacgatctccttt

SEQ ID NO: 7207 - DNA, 31 bp, Artificial Sequence
  Description of Artificial Sequence:  Enzymatic Nucleic acid
gagggaggggctagctacaacgagttctcct

SEQ ID NO: 7208 - DNA, 31 bp, Artificial Sequence
  Description of Artificial Sequence:  Enzymatic Nucleic acid
atgggtggggctagctacaacgatgagggag

SEQ ID NO: 7209 - DNA, 31 bp, Artificial Sequence
  Description of Artificial Sequence:  Enzymatic Nucleic acid
catatgggggctagctacaacgaggctgagg

SEQ ID NO: 7210 - DNA, 31 bp, Artificial Sequence
  Description of Artificial Sequence:  Enzymatic Nucleic acid
ggtacataggctagctacaacgagggtggct

SEQ ID NO: 7211 - DNA, 31 bp, Artificial Sequence
  Description of Artificial Sequence:  Enzymatic Nucleic acid
atggtacaggctagctacaacgaatgggtgg

SEQ ID NO: 7212 - DNA, 31 bp, Artificial Sequence
  Description of Artificial Sequence:  Enzymatic Nucleic acid
cgatggtaggctagctacaacgaatatgggt

SEQ ID NO: 7213 - DNA, 31 bp, Artificial Sequence
  Description of Artificial Sequence:  Enzymatic Nucleic acid
atcgatggggctagctacaacgaacatatgg

SEQ ID NO: 7214 - DNA, 31 bp, Artificial Sequence
  Description of Artificial Sequence:  Enzymatic Nucleic acid
gacatcgaggctagctacaacgaggtacata

SEQ ID NO: 7215 - DNA, 31 bp, Artificial Sequence
  Description of Artificial Sequence:  Enzymatic Nucleic acid
tgtagacaggctagctacaacgacgatggta

SEQ ID NO: 7216 - DNA, 31 bp, Artificial Sequence
  Description of Artificial Sequence:  Enzymatic Nucleic acid
catgtagaggctagctacaacgaatcgatgg

SEQ ID NO: 7217 - DNA, 31 bp, Artificial Sequence
  Description of Artificial Sequence:  Enzymatic Nucleic acid
tgatcatgggctagctacaacgaagacatcg

SEQ ID NO: 7218 - DNA, 31 bp, Artificial Sequence
  Description of Artificial Sequence:  Enzymatic Nucleic acid
catgatcaggctagctacaacgagtagacat

SEQ ID NO: 7219 - DNA, 31 bp, Artificial Sequence
  Description of Artificial Sequence:  Enzymatic Nucleic acid
gaccatgaggctagctacaacgacatgtaga

SEQ ID NO: 7220 - DNA, 31 bp, Artificial Sequence
  Description of Artificial Sequence:  Enzymatic Nucleic acid
cttgaccaggctagctacaacgagatcatgt

SEQ ID NO: 7221 - DNA, 31 bp, Artificial Sequence
  Description of Artificial Sequence:  Enzymatic Nucleic acid
gcacttgaggctagctacaacgacatgatca

SEQ ID NO: 7222 - DNA, 31 bp, Artificial Sequence
  Description of Artificial Sequence:  Enzymatic Nucleic acid
atccagcaggctagctacaacgattgaccat

SEQ ID NO: 7223 - DNA, 31 bp, Artificial Sequence
  Description of Artificial Sequence:  Enzymatic Nucleic acid
tcatccagggctagctacaacgaacttgacc

SEQ ID NO: 7224 - DNA, 31 bp, Artificial Sequence
  Description of Artificial Sequence:  Enzymatic Nucleic acid
gtctatcaggctagctacaacgaccagcact

SEQ ID NO: 7225 - DNA, 31 bp, Artificial Sequence
  Description of Artificial Sequence:  Enzymatic Nucleic acid
tgcgtctaggctagctacaacgacatccagc

SEQ ID NO: 7226 - DNA, 31 bp, Artificial Sequence
  Description of Artificial Sequence:  Enzymatic Nucleic acid
tatctgcgggctagctacaacgactatcatc

SEQ ID NO: 7227 - DNA, 31 bp, Artificial Sequence
  Description of Artificial Sequence:  Enzymatic Nucleic acid
actatctgggctagctacaacgagtctatca

SEQ ID NO: 7228 - DNA, 31 bp, Artificial Sequence
  Description of Artificial Sequence:  Enzymatic Nucleic acid
ggcgactaggctagctacaacgactgcgtct

SEQ ID NO: 7229 - DNA, 31 bp, Artificial Sequence
  Description of Artificial Sequence:  Enzymatic Nucleic acid
ttgggcgaggctagctacaacgatatctgcg

SEQ ID NO: 7230 - DNA, 31 bp, Artificial Sequence
  Description of Artificial Sequence:  Enzymatic Nucleic acid
actttgggggctagctacaacgagactatct

SEQ ID NO: 7231 - DNA, 31 bp, Artificial Sequence
  Description of Artificial Sequence:  Enzymatic Nucleic acid
tcacggaaggctagctacaacgatttgggcg

SEQ ID NO: 7232 - DNA, 31 bp, Artificial Sequence
  Description of Artificial Sequence:  Enzymatic Nucleic acid
tcaactcaggctagctacaacgaggaacttt

SEQ ID NO: 7233 - DNA, 31 bp, Artificial Sequence
  Description of Artificial Sequence:  Enzymatic Nucleic acid
atgatcaaggctagctacaacgatcacggaa

SEQ ID NO: 7234 - DNA, 31 bp, Artificial Sequence
  Description of Artificial Sequence:  Enzymatic Nucleic acid
ttcgatgaggctagctacaacgacaactcac

SEQ ID NO: 7235 - DNA, 31 bp, Artificial Sequence
  Description of Artificial Sequence:  Enzymatic Nucleic acid
gaattcgaggctagctacaacgagatcaact

SEQ ID NO: 7236 - DNA, 31 bp, Artificial Sequence
  Description of Artificial Sequence:  Enzymatic Nucleic acid
ttggagaaggctagctacaacgatcgatgat

SEQ ID NO: 7237 - DNA, 31 bp, Artificial Sequence
  Description of Artificial Sequence:  Enzymatic Nucleic acid
tcgggccaggctagctacaacgatttggaga

SEQ ID NO: 7238 - DNA, 31 bp, Artificial Sequence
  Description of Artificial Sequence:  Enzymatic Nucleic acid
gtctcgggggctagctacaacgacattttgg

SEQ ID NO: 7239 - DNA, 31 bp, Artificial Sequence
  Description of Artificial Sequence:  Enzymatic Nucleic acid
gctgggggggctagctacaacgactcgggcc

SEQ ID NO: 7240 - DNA, 31 bp, Artificial Sequence
  Description of Artificial Sequence:  Enzymatic Nucleic acid
aggtagcgggctagctacaacgatgggggtc

SEQ ID NO: 7241 - DNA, 31 bp, Artificial Sequence
  Description of Artificial Sequence:  Enzymatic Nucleic acid
caaggtagggctagctacaacgagctggggg

SEQ ID NO: 7242 - DNA, 31 bp, Artificial Sequence
  Description of Artificial Sequence:  Enzymatic Nucleic acid
tgacaaggggctagctacaacgaagcgctgg

SEQ ID NO: 7243 - DNA, 31 bp, Artificial Sequence
  Description of Artificial Sequence:  Enzymatic Nucleic acid
ctgaatgaggctagctacaacgaaaggtagc

SEQ ID NO: 7244 - DNA, 31 bp, Artificial Sequence
  Description of Artificial Sequence:  Enzymatic Nucleic acid
cccctgaaggctagctacaacgagacaaggt

SEQ ID NO: 7245 - DNA, 31 bp, Artificial Sequence
  Description of Artificial Sequence:  Enzymatic Nucleic acid
ttctttcaggctagctacaacgaccccctga

SEQ ID NO: 7246 - DNA, 31 bp, Artificial Sequence
  Description of Artificial Sequence:  Enzymatic Nucleic acid
caaatgcaggctagctacaacgatctttcat

SEQ ID NO: 7247 - DNA, 31 bp, Artificial Sequence
  Description of Artificial Sequence:  Enzymatic Nucleic acid
ggcaaatgggctagctacaacgaattctttc

SEQ ID NO: 7248 - DNA, 31 bp, Artificial Sequence
  Description of Artificial Sequence:  Enzymatic Nucleic acid
ttggcaaaggctagctacaacgagcattctt

SEQ ID NO: 7249 - DNA, 31 bp, Artificial Sequence
  Description of Artificial Sequence:  Enzymatic Nucleic acid
ggacttggggctagctacaacgaaaatgcat

SEQ ID NO: 7250 - DNA, 31 bp, Artificial Sequence
  Description of Artificial Sequence:  Enzymatic Nucleic acid
ctgtaggaggctagctacaacgattggcaaa

SEQ ID NO: 7251 - DNA, 31 bp, Artificial Sequence
  Description of Artificial Sequence:  Enzymatic Nucleic acid
ggagtctgggctagctacaacgaaggacttg

SEQ ID NO: 7252 - DNA, 31 bp, Artificial Sequence
  Description of Artificial Sequence:  Enzymatic Nucleic acid
agttggagggctagctacaacgactgtagga

SEQ ID NO: 7253 - DNA, 31 bp, Artificial Sequence
  Description of Artificial Sequence:  Enzymatic Nucleic acid
ggtagaagggctagctacaacgatggagtct

SEQ ID NO: 7254 - DNA, 31 bp, Artificial Sequence
  Description of Artificial Sequence:  Enzymatic Nucleic acid
gggcacggggctagctacaacgaagaagttg

SEQ ID NO: 7255 - DNA, 31 bp, Artificial Sequence
  Description of Artificial Sequence:  Enzymatic Nucleic acid
tcagggcaggctagctacaacgaggtagaag

SEQ ID NO: 7256 - DNA, 31 bp, Artificial Sequence
  Description of Artificial Sequence:  Enzymatic Nucleic acid
catcagggggctagctacaacgaacggtaga

SEQ ID NO: 7257 - DNA, 31 bp, Artificial Sequence
  Description of Artificial Sequence:  Enzymatic Nucleic acid
ttcatccaggctagctacaacgacagggcac

SEQ ID NO: 7258 - DNA, 31 bp, Artificial Sequence
  Description of Artificial Sequence:  Enzymatic Nucleic acid
cttcttcaggctagctacaacgaccatcagg

SEQ ID NO: 7259 - DNA, 31 bp, Artificial Sequence
  Description of Artificial Sequence:  Enzymatic Nucleic acid
cgtccatgggctagctacaacgacttcttca

SEQ ID NO: 7260 - DNA, 31 bp, Artificial Sequence
  Description of Artificial Sequence:  Enzymatic Nucleic acid
gtcgtccaggctagctacaacgagtcttctt

SEQ ID NO: 7261 - DNA, 31 bp, Artificial Sequence
  Description of Artificial Sequence:  Enzymatic Nucleic acid
ccacgtcgggctagctacaacgaccatgtct

SEQ ID NO: 7262 - DNA, 31 bp, Artificial Sequence
  Description of Artificial Sequence:  Enzymatic Nucleic acid
ccaccacgggctagctacaacgacgtccatg

SEQ ID NO: 7263 - DNA, 31 bp, Artificial Sequence
  Description of Artificial Sequence:  Enzymatic Nucleic acid
atccaccaggctagctacaacgagtcgtcca

SEQ ID NO: 7264 - DNA, 31 bp, Artificial Sequence
  Description of Artificial Sequence:  Enzymatic Nucleic acid
ggcatccaggctagctacaacgacacgtcgt

SEQ ID NO: 7265 - DNA, 31 bp, Artificial Sequence
  Description of Artificial Sequence:  Enzymatic Nucleic acid
cgtcggcaggctagctacaacgaccaccacg

SEQ ID NO: 7266 - DNA, 31 bp, Artificial Sequence
  Description of Artificial Sequence:  Enzymatic Nucleic acid
ctcgtcggggctagctacaacgaatccacca

SEQ ID NO: 7267 - DNA, 31 bp, Artificial Sequence
  Description of Artificial Sequence:  Enzymatic Nucleic acid
ggtactcgggctagctacaacgacggcatcc

SEQ ID NO: 7268 - DNA, 31 bp, Artificial Sequence
  Description of Artificial Sequence:  Enzymatic Nucleic acid
atgaggtaggctagctacaacgatcgtcggc

SEQ ID NO: 7269 - DNA, 31 bp, Artificial Sequence
  Description of Artificial Sequence:  Enzymatic Nucleic acid
ggatgaggggctagctacaacgaactcgtcg

SEQ ID NO: 7270 - DNA, 31 bp, Artificial Sequence
  Description of Artificial Sequence:  Enzymatic Nucleic acid
ctgtgggaggctagctacaacgagaggtact

SEQ ID NO: 7271 - DNA, 31 bp, Artificial Sequence
  Description of Artificial Sequence:  Enzymatic Nucleic acid
ccctgctgggctagctacaacgagggatgag

SEQ ID NO: 7272 - DNA, 31 bp, Artificial Sequence
  Description of Artificial Sequence:  Enzymatic Nucleic acid
aagccctgggctagctacaacgatgtgggat

SEQ ID NO: 7273 - DNA, 31 bp, Artificial Sequence
  Description of Artificial Sequence:  Enzymatic Nucleic acid
tgaagaagggctagctacaacgacctgctgt

SEQ ID NO: 7274 - DNA, 31 bp, Artificial Sequence
  Description of Artificial Sequence:  Enzymatic Nucleic acid
aggggctgggctagctacaacgatgaagaag

SEQ ID NO: 7275 - DNA, 31 bp, Artificial Sequence
  Description of Artificial Sequence:  Enzymatic Nucleic acid
tggaggggggctagctacaacgatgctgaag

SEQ ID NO: 7276 - DNA, 31 bp, Artificial Sequence
  Description of Artificial Sequence:  Enzymatic Nucleic acid
ccgtgacgggctagctacaacgaggaggggc

SEQ ID NO: 7277 - DNA, 31 bp, Artificial Sequence
  Description of Artificial Sequence:  Enzymatic Nucleic acid
gtccgtgaggctagctacaacgagtggaggg

SEQ ID NO: 7278 - DNA, 31 bp, Artificial Sequence
  Description of Artificial Sequence:  Enzymatic Nucleic acid
ggagtccgggctagctacaacgagacgtgga

SEQ ID NO: 7279 - DNA, 31 bp, Artificial Sequence
  Description of Artificial Sequence:  Enzymatic Nucleic acid
gaggggagggctagctacaacgaccgtgacg

SEQ ID NO: 7280 - DNA, 31 bp, Artificial Sequence
  Description of Artificial Sequence:  Enzymatic Nucleic acid
tcagagagggctagctacaacgatcaggagg

SEQ ID NO: 7281 - DNA, 31 bp, Artificial Sequence
  Description of Artificial Sequence:  Enzymatic Nucleic acid
tggttgcaggctagctacaacgatcagagag

SEQ ID NO: 7282 - DNA, 31 bp, Artificial Sequence
  Description of Artificial Sequence:  Enzymatic Nucleic acid
gctggttgggctagctacaacgaactcagag

SEQ ID NO: 7283 - DNA, 31 bp, Artificial Sequence
  Description of Artificial Sequence:  Enzymatic Nucleic acid
gttgctggggctagctacaacgatgcactca

SEQ ID NO: 7284 - DNA, 31 bp, Artificial Sequence
  Description of Artificial Sequence:  Enzymatic Nucleic acid
aattgttgggctagctacaacgatggttgca

SEQ ID NO: 7285 - DNA, 31 bp, Artificial Sequence
  Description of Artificial Sequence:  Enzymatic Nucleic acid
tggaattgggctagctacaacgatgctggtt

SEQ ID NO: 7286 - DNA, 31 bp, Artificial Sequence
  Description of Artificial Sequence:  Enzymatic Nucleic acid
cggtggaaggctagctacaacgatgttgctg

SEQ ID NO: 7287 - DNA, 31 bp, Artificial Sequence
  Description of Artificial Sequence:  Enzymatic Nucleic acid
agccacggggctagctacaacgaggaattgt

SEQ ID NO: 7288 - DNA, 31 bp, Artificial Sequence
  Description of Artificial Sequence:  Enzymatic Nucleic acid
gcaagccaggctagctacaacgaggtggaat

SEQ ID NO: 7289 - DNA, 31 bp, Artificial Sequence
  Description of Artificial Sequence:  Enzymatic Nucleic acid
aatgcaagggctagctacaacgacacggtgg

SEQ ID NO: 7290 - DNA, 31 bp, Artificial Sequence
  Description of Artificial Sequence:  Enzymatic Nucleic acid
tatcaatgggctagctacaacgaaagccacg

SEQ ID NO: 7291 - DNA, 31 bp, Artificial Sequence
  Description of Artificial Sequence:  Enzymatic Nucleic acid
tctatcaaggctagctacaacgagcaagcca

SEQ ID NO: 7292 - DNA, 31 bp, Artificial Sequence
  Description of Artificial Sequence:  Enzymatic Nucleic acid
catttctaggctagctacaacgacaatgcaa

SEQ ID NO: 7293 - DNA, 31 bp, Artificial Sequence
  Description of Artificial Sequence:  Enzymatic Nucleic acid
gcagcccaggctagctacaacgattctatca

SEQ ID NO: 7294 - DNA, 31 bp, Artificial Sequence
  Description of Artificial Sequence:  Enzymatic Nucleic acid
ctttgcagggctagctacaacgaccatttct

SEQ ID NO: 7295 - DNA, 31 bp, Artificial Sequence
  Description of Artificial Sequence:  Enzymatic Nucleic acid
cagctttgggctagctacaacgaagcccatt

SEQ ID NO: 7296 - DNA, 31 bp, Artificial Sequence
  Description of Artificial Sequence:  Enzymatic Nucleic acid
tgggacagggctagctacaacgatttgcagc

SEQ ID NO: 7297 - DNA, 31 bp, Artificial Sequence
  Description of Artificial Sequence:  Enzymatic Nucleic acid
tgatgggaggctagctacaacgaagctttgc

SEQ ID NO: 7298 - DNA, 31 bp, Artificial Sequence
  Description of Artificial Sequence:  Enzymatic Nucleic acid
ttccttgaggctagctacaacgagggacagc

SEQ ID NO: 7299 - DNA, 31 bp, Artificial Sequence
  Description of Artificial Sequence:  Enzymatic Nucleic acid
agaagctgggctagctacaacgacttccttg

SEQ ID NO: 7300 - DNA, 31 bp, Artificial Sequence
  Description of Artificial Sequence:  Enzymatic Nucleic acid
gcaagaagggctagctacaacgatgtcttcc

SEQ ID NO: 7301 - DNA, 31 bp, Artificial Sequence
  Description of Artificial Sequence:  Enzymatic Nucleic acid
tatcgctgggctagctacaacgaaagaagct

SEQ ID NO: 7302 - DNA, 31 bp, Artificial Sequence
  Description of Artificial Sequence:  Enzymatic Nucleic acid
ctgtatcgggctagctacaacgatgcaagaa

SEQ ID NO: 7303 - DNA, 31 bp, Artificial Sequence
  Description of Artificial Sequence:  Enzymatic Nucleic acid
gagctgtaggctagctacaacgacgctgcaa

SEQ ID NO: 7304 - DNA, 31 bp, Artificial Sequence
  Description of Artificial Sequence:  Enzymatic Nucleic acid
ctgagctgggctagctacaacgaatcgctgc

SEQ ID NO: 7305 - DNA, 31 bp, Artificial Sequence
  Description of Artificial Sequence:  Enzymatic Nucleic acid
ggtctgagggctagctacaacgatgtatcgc

SEQ ID NO: 7306 - DNA, 31 bp, Artificial Sequence
  Description of Artificial Sequence:  Enzymatic Nucleic acid
ctgtggggggctagctacaacgactgagctg

SEQ ID NO: 7307 - DNA, 31 bp, Artificial Sequence
  Description of Artificial Sequence:  Enzymatic Nucleic acid
ggcgcctgggctagctacaacgaggggtctg

SEQ ID NO: 7308 - DNA, 31 bp, Artificial Sequence
  Description of Artificial Sequence:  Enzymatic Nucleic acid
tcaaggcgggctagctacaacgactgtgggg

SEQ ID NO: 7309 - DNA, 31 bp, Artificial Sequence
  Description of Artificial Sequence:  Enzymatic Nucleic acid
agtcaaggggctagctacaacgagcctgtgg

SEQ ID NO: 7310 - DNA, 31 bp, Artificial Sequence
  Description of Artificial Sequence:  Enzymatic Nucleic acid
gtcctcagggctagctacaacgacaaggcgc

SEQ ID NO: 7311 - DNA, 31 bp, Artificial Sequence
  Description of Artificial Sequence:  Enzymatic Nucleic acid
ctatgctgggctagctacaacgacctcagtc

SEQ ID NO: 7312 - DNA, 31 bp, Artificial Sequence
  Description of Artificial Sequence:  Enzymatic Nucleic acid
cgtctatgggctagctacaacgatgtcctca

SEQ ID NO: 7313 - DNA, 31 bp, Artificial Sequence
  Description of Artificial Sequence:  Enzymatic Nucleic acid
gtcgtctaggctagctacaacgagctgtcct

SEQ ID NO: 7314 - DNA, 31 bp, Artificial Sequence
  Description of Artificial Sequence:  Enzymatic Nucleic acid
aggtgtcgggctagctacaacgactatgctg

SEQ ID NO: 7315 - DNA, 31 bp, Artificial Sequence
  Description of Artificial Sequence:  Enzymatic Nucleic acid
ggaaggtgggctagctacaacgacgtctatg

SEQ ID NO: 7316 - DNA, 31 bp, Artificial Sequence
  Description of Artificial Sequence:  Enzymatic Nucleic acid
gaggaaggggctagctacaacgagtcgtcta

SEQ ID NO: 7317 - DNA, 31 bp, Artificial Sequence
  Description of Artificial Sequence:  Enzymatic Nucleic acid
ttcaggcaggctagctacaacgatgggagga

SEQ ID NO: 7318 - DNA, 31 bp, Artificial Sequence
  Description of Artificial Sequence:  Enzymatic Nucleic acid
tattcaggggctagctacaacgaactgggag

SEQ ID NO: 7319 - DNA, 31 bp, Artificial Sequence
  Description of Artificial Sequence:  Enzymatic Nucleic acid
tttatgtaggctagctacaacgatcaggcac

SEQ ID NO: 7320 - DNA, 31 bp, Artificial Sequence
  Description of Artificial Sequence:  Enzymatic Nucleic acid
ggtttatgggctagctacaacgaattcaggc

SEQ ID NO: 7321 - DNA, 31 bp, Artificial Sequence
  Description of Artificial Sequence:  Enzymatic Nucleic acid
ctggtttaggctagctacaacgagtattcag

SEQ ID NO: 7322 - DNA, 31 bp, Artificial Sequence
  Description of Artificial Sequence:  Enzymatic Nucleic acid
cggactggggctagctacaacgattatgtat

SEQ ID NO: 7323 - DNA, 31 bp, Artificial Sequence
  Description of Artificial Sequence:  Enzymatic Nucleic acid
ggaacggaggctagctacaacgatggtttat

SEQ ID NO: 7324 - DNA, 31 bp, Artificial Sequence
  Description of Artificial Sequence:  Enzymatic Nucleic acid
tttgggaaggctagctacaacgaggactggt

SEQ ID NO: 7325 - DNA, 31 bp, Artificial Sequence
  Description of Artificial Sequence:  Enzymatic Nucleic acid
ccagcgggggctagctacaacgacttttggg

SEQ ID NO: 7326 - DNA, 31 bp, Artificial Sequence
  Description of Artificial Sequence:  Enzymatic Nucleic acid
agagccagggctagctacaacgagggccttt

SEQ ID NO: 7327 - DNA, 31 bp, Artificial Sequence
  Description of Artificial Sequence:  Enzymatic Nucleic acid
gcacagagggctagctacaacgacagcgggc

SEQ ID NO: 7328 - DNA, 31 bp, Artificial Sequence
  Description of Artificial Sequence:  Enzymatic Nucleic acid
attctgcaggctagctacaacgaagagccag

SEQ ID NO: 7329 - DNA, 31 bp, Artificial Sequence
  Description of Artificial Sequence:  Enzymatic Nucleic acid
ggattctgggctagctacaacgaacagagcc

SEQ ID NO: 7330 - DNA, 31 bp, Artificial Sequence
  Description of Artificial Sequence:  Enzymatic Nucleic acid
agacaggaggctagctacaacgatctgcaca

SEQ ID NO: 7331 - DNA, 31 bp, Artificial Sequence
  Description of Artificial Sequence:  Enzymatic Nucleic acid
gtgatagaggctagctacaacgaaggattct

SEQ ID NO: 7332 - DNA, 31 bp, Artificial Sequence
  Description of Artificial Sequence:  Enzymatic Nucleic acid
gattgtgaggctagctacaacgaagacagga

SEQ ID NO: 7333 - DNA, 31 bp, Artificial Sequence
  Description of Artificial Sequence:  Enzymatic Nucleic acid
gctgattgggctagctacaacgagatagaca

SEQ ID NO: 7334 - DNA, 31 bp, Artificial Sequence
  Description of Artificial Sequence:  Enzymatic Nucleic acid
gaggctgaggctagctacaacgatgtgatag

SEQ ID NO: 7335 - DNA, 31 bp, Artificial Sequence
  Description of Artificial Sequence:  Enzymatic Nucleic acid
ttcagaggggctagctacaacgatgattgtg

SEQ ID NO: 7336 - DNA, 31 bp, Artificial Sequence
  Description of Artificial Sequence:  Enzymatic Nucleic acid
gcgcggggggctagctacaacgatcagaggc

SEQ ID NO: 7337 - DNA, 31 bp, Artificial Sequence
  Description of Artificial Sequence:  Enzymatic Nucleic acid
gctgggcgggctagctacaacgaggggttca

SEQ ID NO: 7338 - DNA, 31 bp, Artificial Sequence
  Description of Artificial Sequence:  Enzymatic Nucleic acid
ctgctgggggctagctacaacgagcggggtt

SEQ ID NO: 7339 - DNA, 31 bp, Artificial Sequence
  Description of Artificial Sequence:  Enzymatic Nucleic acid
ggtctctgggctagctacaacgatgggcgcg

SEQ ID NO: 7340 - DNA, 31 bp, Artificial Sequence
  Description of Artificial Sequence:  Enzymatic Nucleic acid
agtgtgggggctagctacaacgactctgctg

SEQ ID NO: 7341 - DNA, 31 bp, Artificial Sequence
  Description of Artificial Sequence:  Enzymatic Nucleic acid
tggtagtgggctagctacaacgagggtctct

SEQ ID NO: 7342 - DNA, 31 bp, Artificial Sequence
  Description of Artificial Sequence:  Enzymatic Nucleic acid
cctggtagggctagctacaacgagtgggtct

SEQ ID NO: 7343 - DNA, 31 bp, Artificial Sequence
  Description of Artificial Sequence:  Enzymatic Nucleic acid
ggtcctggggctagctacaacgaagtgtggg

SEQ ID NO: 7344 - DNA, 31 bp, Artificial Sequence
  Description of Artificial Sequence:  Enzymatic Nucleic acid
tgtgggggggctagctacaacgacctggtag

SEQ ID NO: 7345 - DNA, 31 bp, Artificial Sequence
  Description of Artificial Sequence:  Enzymatic Nucleic acid
cagtgctgggctagctacaacgagggggtcc

SEQ ID NO: 7346 - DNA, 31 bp, Artificial Sequence
  Description of Artificial Sequence:  Enzymatic Nucleic acid
ctgcagtgggctagctacaacgatgtggggg

SEQ ID NO: 7347 - DNA, 31 bp, Artificial Sequence
  Description of Artificial Sequence:  Enzymatic Nucleic acid
cactgcagggctagctacaacgagctgtggg

SEQ ID NO: 7348 - DNA, 31 bp, Artificial Sequence
  Description of Artificial Sequence:  Enzymatic Nucleic acid
gcccactgggctagctacaacgaagtgctgt

SEQ ID NO: 7349 - DNA, 31 bp, Artificial Sequence
  Description of Artificial Sequence:  Enzymatic Nucleic acid
gttgcccaggctagctacaacgatgcagtgc

SEQ ID NO: 7350 - DNA, 31 bp, Artificial Sequence
  Description of Artificial Sequence:  Enzymatic Nucleic acid
cggggttgggctagctacaacgaccactgca

SEQ ID NO: 7351 - DNA, 31 bp, Artificial Sequence
  Description of Artificial Sequence:  Enzymatic Nucleic acid
actcggggggctagctacaacgatgcccact

SEQ ID NO: 7352 - DNA, 31 bp, Artificial Sequence
  Description of Artificial Sequence:  Enzymatic Nucleic acid
ttgagataggctagctacaacgatcggggtt

SEQ ID NO: 7353 - DNA, 31 bp, Artificial Sequence
  Description of Artificial Sequence:  Enzymatic Nucleic acid
tgttgagaggctagctacaacgaactcgggg

SEQ ID NO: 7354 - DNA, 31 bp, Artificial Sequence
  Description of Artificial Sequence:  Enzymatic Nucleic acid
ggacagtgggctagctacaacgatgagatac

SEQ ID NO: 7355 - DNA, 31 bp, Artificial Sequence
  Description of Artificial Sequence:  Enzymatic Nucleic acid
ctggacagggctagctacaacgagttgagat

SEQ ID NO: 7356 - DNA, 31 bp, Artificial Sequence
  Description of Artificial Sequence:  Enzymatic Nucleic acid
gggctggaggctagctacaacgaagtgttga

SEQ ID NO: 7357 - DNA, 31 bp, Artificial Sequence
  Description of Artificial Sequence:  Enzymatic Nucleic acid
caggtgggggctagctacaacgatggacagt

SEQ ID NO: 7358 - DNA, 31 bp, Artificial Sequence
  Description of Artificial Sequence:  Enzymatic Nucleic acid
gacacaggggctagctacaacgagggctgga

SEQ ID NO: 7359 - DNA, 31 bp, Artificial Sequence
  Description of Artificial Sequence:  Enzymatic Nucleic acid
tgttgacaggctagctacaacgaaggtgggc

SEQ ID NO: 7360 - DNA, 31 bp, Artificial Sequence
  Description of Artificial Sequence:  Enzymatic Nucleic acid
gctgttgaggctagctacaacgaacaggtgg

SEQ ID NO: 7361 - DNA, 31 bp, Artificial Sequence
  Description of Artificial Sequence:  Enzymatic Nucleic acid
atgtgctgggctagctacaacgatgacacag

SEQ ID NO: 7362 - DNA, 31 bp, Artificial Sequence
  Description of Artificial Sequence:  Enzymatic Nucleic acid
cgaatgtgggctagctacaacgatgttgaca

SEQ ID NO: 7363 - DNA, 31 bp, Artificial Sequence
  Description of Artificial Sequence:  Enzymatic Nucleic acid
gtcgaatgggctagctacaacgagctgttga

SEQ ID NO: 7364 - DNA, 31 bp, Artificial Sequence
  Description of Artificial Sequence:  Enzymatic Nucleic acid
ctgtcgaaggctagctacaacgagtgctgtt

SEQ ID NO: 7365 - DNA, 31 bp, Artificial Sequence
  Description of Artificial Sequence:  Enzymatic Nucleic acid
cagggctgggctagctacaacgacgaatgtg

SEQ ID NO: 7366 - DNA, 31 bp, Artificial Sequence
  Description of Artificial Sequence:  Enzymatic Nucleic acid
gggcagggggctagctacaacgatgtcgaat

SEQ ID NO: 7367 - DNA, 31 bp, Artificial Sequence
  Description of Artificial Sequence:  Enzymatic Nucleic acid
ccagtgggggctagctacaacgaagggctgt

SEQ ID NO: 7368 - DNA, 31 bp, Artificial Sequence
  Description of Artificial Sequence:  Enzymatic Nucleic acid
gggcccagggctagctacaacgagggcaggg

SEQ ID NO: 7369 - DNA, 31 bp, Artificial Sequence
  Description of Artificial Sequence:  Enzymatic Nucleic acid
tttctgggggctagctacaacgaccagtggg

SEQ ID NO: 7370 - DNA, 31 bp, Artificial Sequence
  Description of Artificial Sequence:  Enzymatic Nucleic acid
ggtggctgggctagctacaacgactttctgg

SEQ ID NO: 7371 - DNA, 31 bp, Artificial Sequence
  Description of Artificial Sequence:  Enzymatic Nucleic acid
tttggtggggctagctacaacgatgcctttc

SEQ ID NO: 7372 - DNA, 31 bp, Artificial Sequence
  Description of Artificial Sequence:  Enzymatic Nucleic acid
taatttggggctagctacaacgaggctgcct

SEQ ID NO: 7373 - DNA, 31 bp, Artificial Sequence
  Description of Artificial Sequence:  Enzymatic Nucleic acid
caggctaaggctagctacaacgattggtggc

SEQ ID NO: 7374 - DNA, 31 bp, Artificial Sequence
  Description of Artificial Sequence:  Enzymatic Nucleic acid
tgtccaggggctagctacaacgataatttgg

SEQ ID NO: 7375 - DNA, 31 bp, Artificial Sequence
  Description of Artificial Sequence:  Enzymatic Nucleic acid
cagggttgggctagctacaacgaccaggcta

SEQ ID NO: 7376 - DNA, 31 bp, Artificial Sequence
  Description of Artificial Sequence:  Enzymatic Nucleic acid
agtcagggggctagctacaacgatgtccagg

SEQ ID NO: 7377 - DNA, 31 bp, Artificial Sequence
  Description of Artificial Sequence:  Enzymatic Nucleic acid
gctggtagggctagctacaacgacagggttg

SEQ ID NO: 7378 - DNA, 31 bp, Artificial Sequence
  Description of Artificial Sequence:  Enzymatic Nucleic acid
cctgctggggctagctacaacgaagtcaggg

SEQ ID NO: 7379 - DNA, 31 bp, Artificial Sequence
  Description of Artificial Sequence:  Enzymatic Nucleic acid
aagtcctgggctagctacaacgatggtagtc

SEQ ID NO: 7380 - DNA, 31 bp, Artificial Sequence
  Description of Artificial Sequence:  Enzymatic Nucleic acid
gaaagaagggctagctacaacgacctgctgg

SEQ ID NO: 7381 - DNA, 31 bp, Artificial Sequence
  Description of Artificial Sequence:  Enzymatic Nucleic acid
tggcttggggctagctacaacgattccttgg

SEQ ID NO: 7382 - DNA, 31 bp, Artificial Sequence
  Description of Artificial Sequence:  Enzymatic Nucleic acid
ccatttggggctagctacaacgattggcttc

SEQ ID NO: 7383 - DNA, 31 bp, Artificial Sequence
  Description of Artificial Sequence:  Enzymatic Nucleic acid
agatgccaggctagctacaacgattggcttg

SEQ ID NO: 7384 - DNA, 31 bp, Artificial Sequence
  Description of Artificial Sequence:  Enzymatic Nucleic acid
taaagatgggctagctacaacgacatttggc

SEQ ID NO: 7385 - DNA, 31 bp, Artificial Sequence
  Description of Artificial Sequence:  Enzymatic Nucleic acid
cttaaagaggctagctacaacgagccatttg

SEQ ID NO: 7386 - DNA, 31 bp, Artificial Sequence
  Description of Artificial Sequence:  Enzymatic Nucleic acid
ctgtggagggctagctacaacgaccttaaag

SEQ ID NO: 7387 - DNA, 31 bp, Artificial Sequence
  Description of Artificial Sequence:  Enzymatic Nucleic acid
ttcagctgggctagctacaacgaggagccct

SEQ ID NO: 7388 - DNA, 31 bp, Artificial Sequence
  Description of Artificial Sequence:  Enzymatic Nucleic acid
attttcagggctagctacaacgatgtggagc

SEQ ID NO: 7389 - DNA, 31 bp, Artificial Sequence
  Description of Artificial Sequence:  Enzymatic Nucleic acid
attctgcaggctagctacaacgatttcagct

SEQ ID NO: 7390 - DNA, 31 bp, Artificial Sequence
  Description of Artificial Sequence:  Enzymatic Nucleic acid
gtattctgggctagctacaacgaattttcag

SEQ ID NO: 7391 - DNA, 31 bp, Artificial Sequence
  Description of Artificial Sequence:  Enzymatic Nucleic acid
cttaggtaggctagctacaacgatctgcatt

SEQ ID NO: 7392 - DNA, 31 bp, Artificial Sequence
  Description of Artificial Sequence:  Enzymatic Nucleic acid
cccttaggggctagctacaacgaattctgca

SEQ ID NO: 7393 - DNA, 31 bp, Artificial Sequence
  Description of Artificial Sequence:  Enzymatic Nucleic acid
tggcgcgaggctagctacaacgaccttaggt

SEQ ID NO: 7394 - DNA, 31 bp, Artificial Sequence
  Description of Artificial Sequence:  Enzymatic Nucleic acid
ttgtggcgggctagctacaacgagaccctta

SEQ ID NO: 7395 - DNA, 31 bp, Artificial Sequence
  Description of Artificial Sequence:  Enzymatic Nucleic acid
ctttgtggggctagctacaacgagcgaccct

SEQ ID NO: 7396 - DNA, 31 bp, Artificial Sequence
  Description of Artificial Sequence:  Enzymatic Nucleic acid
ctgctttgggctagctacaacgaggcgcgac

SEQ ID NO: 7397 - DNA, 31 bp, Artificial Sequence
  Description of Artificial Sequence:  Enzymatic Nucleic acid
attcactgggctagctacaacgatttgtggc

SEQ ID NO: 7398 - DNA, 31 bp, Artificial Sequence
  Description of Artificial Sequence:  Enzymatic Nucleic acid
taaattcaggctagctacaacgatgctttgt

SEQ ID NO: 7399 - DNA, 31 bp, Artificial Sequence
  Description of Artificial Sequence:  Enzymatic Nucleic acid
ccaataaaggctagctacaacgatcactgct

SEQ ID NO: 7400 - DNA, 31 bp, Artificial Sequence
  Description of Artificial Sequence:  Enzymatic Nucleic acid
tgctccaaggctagctacaacgaaaattcac

SEQ ID NO: 7401 - DNA, 31 bp, Artificial Sequence
  Description of Artificial Sequence:  Enzymatic Nucleic acid
tggtcatgggctagctacaacgatccaataa

SEQ ID NO: 7402 - DNA, 31 bp, Artificial Sequence
  Description of Artificial Sequence:  Enzymatic Nucleic acid
cgtggtcaggctagctacaacgagctccaat

SEQ ID NO: 7403 - DNA, 31 bp, Artificial Sequence
  Description of Artificial Sequence:  Enzymatic Nucleic acid
ctccgtggggctagctacaacgacatgctcc

SEQ ID NO: 7404 - DNA, 31 bp, Artificial Sequence
  Description of Artificial Sequence:  Enzymatic Nucleic acid
atcctccgggctagctacaacgaggtcatgc

SEQ ID NO: 7405 - DNA, 31 bp, Artificial Sequence
  Description of Artificial Sequence:  Enzymatic Nucleic acid
tcatactaggctagctacaacgacctccgtg

SEQ ID NO: 7406 - DNA, 31 bp, Artificial Sequence
  Description of Artificial Sequence:  Enzymatic Nucleic acid
ggctcataggctagctacaacgatatcctcc

SEQ ID NO: 7407 - DNA, 31 bp, Artificial Sequence
  Description of Artificial Sequence:  Enzymatic Nucleic acid
agggctcaggctagctacaacgaactatcct

SEQ ID NO: 7408 - DNA, 31 bp, Artificial Sequence
  Description of Artificial Sequence:  Enzymatic Nucleic acid
ttttagggggctagctacaacgatcatacta

SEQ ID NO: 7409 - DNA, 31 bp, Artificial Sequence
  Description of Artificial Sequence:  Enzymatic Nucleic acid
agtctggaggctagctacaacgattttaggg

SEQ ID NO: 7410 - DNA, 31 bp, Artificial Sequence
  Description of Artificial Sequence:  Enzymatic Nucleic acid
cgaaagagggctagctacaacgactggattt

SEQ ID NO: 7411 - DNA, 31 bp, Artificial Sequence
  Description of Artificial Sequence:  Enzymatic Nucleic acid
cctgggtaggctagctacaacgacgaaagag

SEQ ID NO: 7412 - DNA, 31 bp, Artificial Sequence
  Description of Artificial Sequence:  Enzymatic Nucleic acid
gtcctgggggctagctacaacgaatcgaaag

SEQ ID NO: 7413 - DNA, 31 bp, Artificial Sequence
  Description of Artificial Sequence:  Enzymatic Nucleic acid
tggcttggggctagctacaacgacctgggta

SEQ ID NO: 7414 - DNA, 31 bp, Artificial Sequence
  Description of Artificial Sequence:  Enzymatic Nucleic acid
tgctgtggggctagctacaacgattggtcct

SEQ ID NO: 7415 - DNA, 31 bp, Artificial Sequence
  Description of Artificial Sequence:  Enzymatic Nucleic acid
acctgctgggctagctacaacgaggcttggt

SEQ ID NO: 7416 - DNA, 31 bp, Artificial Sequence
  Description of Artificial Sequence:  Enzymatic Nucleic acid
aggacctgggctagctacaacgatgtggctt

SEQ ID NO: 7417 - DNA, 31 bp, Artificial Sequence
  Description of Artificial Sequence:  Enzymatic Nucleic acid
atggaggaggctagctacaacgactgctgtg

SEQ ID NO: 7418 - DNA, 31 bp, Artificial Sequence
  Description of Artificial Sequence:  Enzymatic Nucleic acid
tgttgggaggctagctacaacgaggaggacc

SEQ ID NO: 7419 - DNA, 31 bp, Artificial Sequence
  Description of Artificial Sequence:  Enzymatic Nucleic acid
catggctgggctagctacaacgatgggatgg

SEQ ID NO: 7420 - DNA, 31 bp, Artificial Sequence
  Description of Artificial Sequence:  Enzymatic Nucleic acid
gggcatggggctagctacaacgatgttggga

SEQ ID NO: 7421 - DNA, 31 bp, Artificial Sequence
  Description of Artificial Sequence:  Enzymatic Nucleic acid
tgcgggcaggctagctacaacgaggctgttg

SEQ ID NO: 7422 - DNA, 31 bp, Artificial Sequence
  Description of Artificial Sequence:  Enzymatic Nucleic acid
aatgcgggggctagctacaacgaatggctgt

SEQ ID NO: 7423 - DNA, 31 bp, Artificial Sequence
  Description of Artificial Sequence:  Enzymatic Nucleic acid
agctaatgggctagctacaacgagggcatgg

SEQ ID NO: 7424 - DNA, 31 bp, Artificial Sequence
  Description of Artificial Sequence:  Enzymatic Nucleic acid
agagctaaggctagctacaacgagcgggcat

SEQ ID NO: 7425 - DNA, 31 bp, Artificial Sequence
  Description of Artificial Sequence:  Enzymatic Nucleic acid
tctaagagggctagctacaacgataatgcgg

SEQ ID NO: 7426 - DNA, 31 bp, Artificial Sequence
  Description of Artificial Sequence:  Enzymatic Nucleic acid
tctgtgggggctagctacaacgactaagagc

SEQ ID NO: 7427 - DNA, 31 bp, Artificial Sequence
  Description of Artificial Sequence:  Enzymatic Nucleic acid
ccagtctgggctagctacaacgagggtctaa

SEQ ID NO: 7428 - DNA, 31 bp, Artificial Sequence
  Description of Artificial Sequence:  Enzymatic Nucleic acid
aaaaccagggctagctacaacgactgtgggt

SEQ ID NO: 7429 - DNA, 31 bp, Artificial Sequence
  Description of Artificial Sequence:  Enzymatic Nucleic acid
ttgcaaaaggctagctacaacgacagtctgt

SEQ ID NO: 7430 - DNA, 31 bp, Artificial Sequence
  Description of Artificial Sequence:  Enzymatic Nucleic acid
aaacgttgggctagctacaacgaaaaaccag

SEQ ID NO: 7431 - DNA, 31 bp, Artificial Sequence
  Description of Artificial Sequence:  Enzymatic Nucleic acid
tgtaaacgggctagctacaacgatgcaaaac

SEQ ID NO: 7432 - DNA, 31 bp, Artificial Sequence
  Description of Artificial Sequence:  Enzymatic Nucleic acid
ggtgtaaaggctagctacaacgagttgcaaa

SEQ ID NO: 7433 - DNA, 31 bp, Artificial Sequence
  Description of Artificial Sequence:  Enzymatic Nucleic acid
agtcggtgggctagctacaacgaaaacgttg

SEQ ID NO: 7434 - DNA, 31 bp, Artificial Sequence
  Description of Artificial Sequence:  Enzymatic Nucleic acid
ctagtcggggctagctacaacgagtaaacgt

SEQ ID NO: 7435 - DNA, 31 bp, Artificial Sequence
  Description of Artificial Sequence:  Enzymatic Nucleic acid
ctggctagggctagctacaacgacggtgtaa

SEQ ID NO: 7436 - DNA, 31 bp, Artificial Sequence
  Description of Artificial Sequence:  Enzymatic Nucleic acid
cttcctggggctagctacaacgatagtcggt

SEQ ID NO: 7437 - DNA, 31 bp, Artificial Sequence
  Description of Artificial Sequence:  Enzymatic Nucleic acid
tggaagtaggctagctacaacgattcctggc

SEQ ID NO: 7438 - DNA, 31 bp, Artificial Sequence
  Description of Artificial Sequence:  Enzymatic Nucleic acid
ggtggaagggctagctacaacgaacttcctg

SEQ ID NO: 7439 - DNA, 31 bp, Artificial Sequence
  Description of Artificial Sequence:  Enzymatic Nucleic acid
gcccgaggggctagctacaacgaggaagtac

SEQ ID NO: 7440 - DNA, 31 bp, Artificial Sequence
  Description of Artificial Sequence:  Enzymatic Nucleic acid
aaaatgtgggctagctacaacgaccgaggtg

SEQ ID NO: 7441 - DNA, 31 bp, Artificial Sequence
  Description of Artificial Sequence:  Enzymatic Nucleic acid
ccaaaatgggctagctacaacgagcccgagg

SEQ ID NO: 7442 - DNA, 31 bp, Artificial Sequence
  Description of Artificial Sequence:  Enzymatic Nucleic acid
tcccaaaaggctagctacaacgagtgcccga

SEQ ID NO: 7443 - DNA, 31 bp, Artificial Sequence
  Description of Artificial Sequence:  Enzymatic Nucleic acid
gaatgcaaggctagctacaacgattcccaaa

SEQ ID NO: 7444 - DNA, 31 bp, Artificial Sequence
  Description of Artificial Sequence:  Enzymatic Nucleic acid
aaggaatgggctagctacaacgaaacttccc

SEQ ID NO: 7445 - DNA, 31 bp, Artificial Sequence
  Description of Artificial Sequence:  Enzymatic Nucleic acid
caaaggaaggctagctacaacgagcaacttc

SEQ ID NO: 7446 - DNA, 31 bp, Artificial Sequence
  Description of Artificial Sequence:  Enzymatic Nucleic acid
tttgaagaggctagctacaacgaaaaggaat

SEQ ID NO: 7447 - DNA, 31 bp, Artificial Sequence
  Description of Artificial Sequence:  Enzymatic Nucleic acid
cttcacagggctagctacaacgattgaagac

SEQ ID NO: 7448 - DNA, 31 bp, Artificial Sequence
  Description of Artificial Sequence:  Enzymatic Nucleic acid
atgcttcaggctagctacaacgaagtttgaa

SEQ ID NO: 7449 - DNA, 31 bp, Artificial Sequence
  Description of Artificial Sequence:  Enzymatic Nucleic acid
tgtaaatgggctagctacaacgattcacagt

SEQ ID NO: 7450 - DNA, 31 bp, Artificial Sequence
  Description of Artificial Sequence:  Enzymatic Nucleic acid
tctgtaaaggctagctacaacgagcttcaca

SEQ ID NO: 7451 - DNA, 31 bp, Artificial Sequence
  Description of Artificial Sequence:  Enzymatic Nucleic acid
cgtttctgggctagctacaacgaaaatgctt

SEQ ID NO: 7452 - DNA, 31 bp, Artificial Sequence
  Description of Artificial Sequence:  Enzymatic Nucleic acid
tggatgcgggctagctacaacgattctgtaa

SEQ ID NO: 7453 - DNA, 31 bp, Artificial Sequence
  Description of Artificial Sequence:  Enzymatic Nucleic acid
gctggatgggctagctacaacgagtttctgt

SEQ ID NO: 7454 - DNA, 31 bp, Artificial Sequence
  Description of Artificial Sequence:  Enzymatic Nucleic acid
ttgctggaggctagctacaacgagcgtttct

SEQ ID NO: 7455 - DNA, 31 bp, Artificial Sequence
  Description of Artificial Sequence:  Enzymatic Nucleic acid
tattcttgggctagctacaacgatggatgcg

SEQ ID NO: 7456 - DNA, 31 bp, Artificial Sequence
  Description of Artificial Sequence:  Enzymatic Nucleic acid
ggacaataggctagctacaacgatcttgctg

SEQ ID NO: 7457 - DNA, 31 bp, Artificial Sequence
  Description of Artificial Sequence:  Enzymatic Nucleic acid
agggacaaggctagctacaacgaattcttgc

SEQ ID NO: 7458 - DNA, 31 bp, Artificial Sequence
  Description of Artificial Sequence:  Enzymatic Nucleic acid
caaagggaggctagctacaacgaaatattct

SEQ ID NO: 7459 - DNA, 31 bp, Artificial Sequence
  Description of Artificial Sequence:  Enzymatic Nucleic acid
aatttctgggctagctacaacgatcaaaggg

SEQ ID NO: 7460 - DNA, 31 bp, Artificial Sequence
  Description of Artificial Sequence:  Enzymatic Nucleic acid
aagataaaggctagctacaacgattctgctc

SEQ ID NO: 7461 - DNA, 31 bp, Artificial Sequence
  Description of Artificial Sequence:  Enzymatic Nucleic acid
ttgaaagaggctagctacaacgaaaatttct

SEQ ID NO: 7462 - DNA, 31 bp, Artificial Sequence
  Description of Artificial Sequence:  Enzymatic Nucleic acid
caaatataggctagctacaacgactctttga

SEQ ID NO: 7463 - DNA, 31 bp, Artificial Sequence
  Description of Artificial Sequence:  Enzymatic Nucleic acid
ttcaaataggctagctacaacgaacctcttt

SEQ ID NO: 7464 - DNA, 31 bp, Artificial Sequence
  Description of Artificial Sequence:  Enzymatic Nucleic acid
ttttcaaaggctagctacaacgaatacctct

SEQ ID NO: 7465 - DNA, 31 bp, Artificial Sequence
  Description of Artificial Sequence:  Enzymatic Nucleic acid
cacatataggctagctacaacgatttttttt

SEQ ID NO: 7466 - DNA, 31 bp, Artificial Sequence
  Description of Artificial Sequence:  Enzymatic Nucleic acid
ctcacataggctagctacaacgaactttttt

SEQ ID NO: 7467 - DNA, 31 bp, Artificial Sequence
  Description of Artificial Sequence:  Enzymatic Nucleic acid
tcctcacaggctagctacaacgaatactttt

SEQ ID NO: 7468 - DNA, 31 bp, Artificial Sequence
  Description of Artificial Sequence:  Enzymatic Nucleic acid
aatcctcaggctagctacaacgaatatactt

SEQ ID NO: 7469 - DNA, 31 bp, Artificial Sequence
  Description of Artificial Sequence:  Enzymatic Nucleic acid
aataaaaaggctagctacaacgacctcacat

SEQ ID NO: 7470 - DNA, 31 bp, Artificial Sequence
  Description of Artificial Sequence:  Enzymatic Nucleic acid
ccaatcaaggctagctacaacgaaaaaatcc

SEQ ID NO: 7471 - DNA, 31 bp, Artificial Sequence
  Description of Artificial Sequence:  Enzymatic Nucleic acid
atccccaaggctagctacaacgacaataaaa

SEQ ID NO: 7472 - DNA, 31 bp, Artificial Sequence
  Description of Artificial Sequence:  Enzymatic Nucleic acid
ctccaagaggctagctacaacgaccccaatc

SEQ ID NO: 7473 - DNA, 31 bp, Artificial Sequence
  Description of Artificial Sequence:  Enzymatic Nucleic acid
atgaaaaaggctagctacaacgatccaagat

SEQ ID NO: 7474 - DNA, 31 bp, Artificial Sequence
  Description of Artificial Sequence:  Enzymatic Nucleic acid
agcgacaaggctagctacaacgagaaaaact

SEQ ID NO: 7475 - DNA, 31 bp, Artificial Sequence
  Description of Artificial Sequence:  Enzymatic Nucleic acid
aatagcgaggctagctacaacgaaatgaaaa

SEQ ID NO: 7476 - DNA, 31 bp, Artificial Sequence
  Description of Artificial Sequence:  Enzymatic Nucleic acid
atcaatagggctagctacaacgagacaatga

SEQ ID NO: 7477 - DNA, 31 bp, Artificial Sequence
  Description of Artificial Sequence:  Enzymatic Nucleic acid
aaaatcaaggctagctacaacgaagcgacaa

SEQ ID NO: 7478 - DNA, 31 bp, Artificial Sequence
  Description of Artificial Sequence:  Enzymatic Nucleic acid
agtaaaaaggctagctacaacgacaatagcg

SEQ ID NO: 7479 - DNA, 31 bp, Artificial Sequence
  Description of Artificial Sequence:  Enzymatic Nucleic acid
cattgaagggctagctacaacgaaaaaatca

SEQ ID NO: 7480 - DNA, 31 bp, Artificial Sequence
  Description of Artificial Sequence:  Enzymatic Nucleic acid
agagcccaggctagctacaacgatgaagtaa

SEQ ID NO: 7481 - DNA, 31 bp, Artificial Sequence
  Description of Artificial Sequence:  Enzymatic Nucleic acid
tggaagagggctagctacaacgaccattgaa

SEQ ID NO: 7482 - DNA, 31 bp, Artificial Sequence
  Description of Artificial Sequence:  Enzymatic Nucleic acid
cttccttgggctagctacaacgatggaagag

SEQ ID NO: 7483 - DNA, 31 bp, Artificial Sequence
  Description of Artificial Sequence:  Enzymatic Nucleic acid
ccagcaagggctagctacaacgattcttcct

SEQ ID NO: 7484 - DNA, 31 bp, Artificial Sequence
  Description of Artificial Sequence:  Enzymatic Nucleic acid
gctaccagggctagctacaacgaaagcttct

SEQ ID NO: 7485 - DNA, 31 bp, Artificial Sequence
  Description of Artificial Sequence:  Enzymatic Nucleic acid
aagtgctaggctagctacaacgacagcaagc

SEQ ID NO: 7486 - DNA, 31 bp, Artificial Sequence
  Description of Artificial Sequence:  Enzymatic Nucleic acid
agcaagtgggctagctacaacgataccagca

SEQ ID NO: 7487 - DNA, 31 bp, Artificial Sequence
  Description of Artificial Sequence:  Enzymatic Nucleic acid
gtagcaagggctagctacaacgagctaccag

SEQ ID NO: 7488 - DNA, 31 bp, Artificial Sequence
  Description of Artificial Sequence:  Enzymatic Nucleic acid
cagggtagggctagctacaacgaaagtgcta

SEQ ID NO: 7489 - DNA, 31 bp, Artificial Sequence
  Description of Artificial Sequence:  Enzymatic Nucleic acid
actcagggggctagctacaacgaagcaagtg

SEQ ID NO: 7490 - DNA, 31 bp, Artificial Sequence
  Description of Artificial Sequence:  Enzymatic Nucleic acid
tggatgaaggctagctacaacgatcagggta

SEQ ID NO: 7491 - DNA, 31 bp, Artificial Sequence
  Description of Artificial Sequence:  Enzymatic Nucleic acid
ggcctggaggctagctacaacgagaactcag

SEQ ID NO: 7492 - DNA, 31 bp, Artificial Sequence
  Description of Artificial Sequence:  Enzymatic Nucleic acid
cagttgggggctagctacaacgactggatga

SEQ ID NO: 7493 - DNA, 31 bp, Artificial Sequence
  Description of Artificial Sequence:  Enzymatic Nucleic acid
gctcacagggctagctacaacgatgggcctg

SEQ ID NO: 7494 - DNA, 31 bp, Artificial Sequence
  Description of Artificial Sequence:  Enzymatic Nucleic acid
cttgctcaggctagctacaacgaagttgggc

SEQ ID NO: 7495 - DNA, 31 bp, Artificial Sequence
  Description of Artificial Sequence:  Enzymatic Nucleic acid
gctccttgggctagctacaacgatcacagtt

SEQ ID NO: 7496 - DNA, 31 bp, Artificial Sequence
  Description of Artificial Sequence:  Enzymatic Nucleic acid
ggcttgtgggctagctacaacgatccttgct

SEQ ID NO: 7497 - DNA, 31 bp, Artificial Sequence
  Description of Artificial Sequence:  Enzymatic Nucleic acid
gtggcttgggctagctacaacgagctccttg

SEQ ID NO: 7498 - DNA, 31 bp, Artificial Sequence
  Description of Artificial Sequence:  Enzymatic Nucleic acid
acttgtggggctagctacaacgattgtgctc

SEQ ID NO: 7499 - DNA, 31 bp, Artificial Sequence
  Description of Artificial Sequence:  Enzymatic Nucleic acid
aagacttgggctagctacaacgaggcttgtg

SEQ ID NO: 7500 - DNA, 31 bp, Artificial Sequence
  Description of Artificial Sequence:  Enzymatic Nucleic acid
ctggaagaggctagctacaacgattgtggct

SEQ ID NO: 7501 - DNA, 31 bp, Artificial Sequence
  Description of Artificial Sequence:  Enzymatic Nucleic acid
atcaagcaggctagctacaacgacctctgga

SEQ ID NO: 7502 - DNA, 31 bp, Artificial Sequence
  Description of Artificial Sequence:  Enzymatic Nucleic acid
gaatcaagggctagctacaacgaatcctctg

SEQ ID NO: 7503 - DNA, 31 bp, Artificial Sequence
  Description of Artificial Sequence:  Enzymatic Nucleic acid
cactggaaggctagctacaacgacaagcatc

SEQ ID NO: 7504 - DNA, 31 bp, Artificial Sequence
  Description of Artificial Sequence:  Enzymatic Nucleic acid
cagaaccaggctagctacaacgatggaatca

SEQ ID NO: 7505 - DNA, 31 bp, Artificial Sequence
  Description of Artificial Sequence:  Enzymatic Nucleic acid
aagcagaaggctagctacaacgacactggaa

SEQ ID NO: 7506 - DNA, 31 bp, Artificial Sequence
  Description of Artificial Sequence:  Enzymatic Nucleic acid
ccttgaagggctagctacaacgaagaaccac

SEQ ID NO: 7507 - DNA, 31 bp, Artificial Sequence
  Description of Artificial Sequence:  Enzymatic Nucleic acid
agtggaagggctagctacaacgacttgaagc

SEQ ID NO: 7508 - DNA, 31 bp, Artificial Sequence
  Description of Artificial Sequence:  Enzymatic Nucleic acid
ttttgcagggctagctacaacgaggaagcct

SEQ ID NO: 7509 - DNA, 31 bp, Artificial Sequence
  Description of Artificial Sequence:  Enzymatic Nucleic acid
gtgttttgggctagctacaacgaagtggaag

SEQ ID NO: 7510 - DNA, 31 bp, Artificial Sequence
  Description of Artificial Sequence:  Enzymatic Nucleic acid
ctttagtgggctagctacaacgatttgcagt

SEQ ID NO: 7511 - DNA, 31 bp, Artificial Sequence
  Description of Artificial Sequence:  Enzymatic Nucleic acid
atctttagggctagctacaacgagttttgca

SEQ ID NO: 7512 - DNA, 31 bp, Artificial Sequence
  Description of Artificial Sequence:  Enzymatic Nucleic acid
ttcttggaggctagctacaacgactttagtg

SEQ ID NO: 7513 - DNA, 31 bp, Artificial Sequence
  Description of Artificial Sequence:  Enzymatic Nucleic acid
catgaaggggctagctacaacgacttcttgg

SEQ ID NO: 7514 - DNA, 31 bp, Artificial Sequence
  Description of Artificial Sequence:  Enzymatic Nucleic acid
tggggccaggctagctacaacgagaaggcct

SEQ ID NO: 7515 - DNA, 31 bp, Artificial Sequence
  Description of Artificial Sequence:  Enzymatic Nucleic acid
tgctggggggctagctacaacgacatgaagg

SEQ ID NO: 7516 - DNA, 31 bp, Artificial Sequence
  Description of Artificial Sequence:  Enzymatic Nucleic acid
ccggcctgggctagctacaacgatggggcca

SEQ ID NO: 7517 - DNA, 31 bp, Artificial Sequence
  Description of Artificial Sequence:  Enzymatic Nucleic acid
cgatccggggctagctacaacgactgctggg

SEQ ID NO: 7518 - DNA, 31 bp, Artificial Sequence
  Description of Artificial Sequence:  Enzymatic Nucleic acid
agtaccgaggctagctacaacgaccggcctg

SEQ ID NO: 7519 - DNA, 31 bp, Artificial Sequence
  Description of Artificial Sequence:  Enzymatic Nucleic acid
atacagtaggctagctacaacgacgatccgg

SEQ ID NO: 7520 - DNA, 31 bp, Artificial Sequence
  Description of Artificial Sequence:  Enzymatic Nucleic acid
tgatacagggctagctacaacgaaccgatcc

SEQ ID NO: 7521 - DNA, 31 bp, Artificial Sequence
  Description of Artificial Sequence:  Enzymatic Nucleic acid
acttgataggctagctacaacgaagtaccga

SEQ ID NO: 7522 - DNA, 31 bp, Artificial Sequence
  Description of Artificial Sequence:  Enzymatic Nucleic acid
tgacttgaggctagctacaacgaacagtacc

SEQ ID NO: 7523 - DNA, 31 bp, Artificial Sequence
  Description of Artificial Sequence:  Enzymatic Nucleic acid
tgccatgaggctagctacaacgattgataca

SEQ ID NO: 7524 - DNA, 31 bp, Artificial Sequence
  Description of Artificial Sequence:  Enzymatic Nucleic acid
acctgccaggctagctacaacgagacttgat

SEQ ID NO: 7525 - DNA, 31 bp, Artificial Sequence
  Description of Artificial Sequence:  Enzymatic Nucleic acid
tgtacctgggctagctacaacgacatgactt

SEQ ID NO: 7526 - DNA, 31 bp, Artificial Sequence
  Description of Artificial Sequence:  Enzymatic Nucleic acid
ctactgtaggctagctacaacgactgccatg

SEQ ID NO: 7527 - DNA, 31 bp, Artificial Sequence
  Description of Artificial Sequence:  Enzymatic Nucleic acid
tcctactgggctagctacaacgaacctgcca

SEQ ID NO: 7528 - DNA, 31 bp, Artificial Sequence
  Description of Artificial Sequence:  Enzymatic Nucleic acid
ttatcctaggctagctacaacgatgtacctg

SEQ ID NO: 7529 - DNA, 31 bp, Artificial Sequence
  Description of Artificial Sequence:  Enzymatic Nucleic acid
gtggcttaggctagctacaacgacctactgt

SEQ ID NO: 7530 - DNA, 31 bp, Artificial Sequence
  Description of Artificial Sequence:  Enzymatic Nucleic acid
cagagtggggctagctacaacgattatccta

SEQ ID NO: 7531 - DNA, 31 bp, Artificial Sequence
  Description of Artificial Sequence:  Enzymatic Nucleic acid
ggacagagggctagctacaacgaggcttatc

SEQ ID NO: 7532 - DNA, 31 bp, Artificial Sequence
  Description of Artificial Sequence:  Enzymatic Nucleic acid
ggaagggaggctagctacaacgaagagtggc

SEQ ID NO: 7533 - DNA, 31 bp, Artificial Sequence
  Description of Artificial Sequence:  Enzymatic Nucleic acid
cttctttgggctagctacaacgaccaggaag

SEQ ID NO: 7534 - DNA, 31 bp, Artificial Sequence
  Description of Artificial Sequence:  Enzymatic Nucleic acid
cccctccgggctagctacaacgattcttctt

SEQ ID NO: 7535 - DNA, 31 bp, Artificial Sequence
  Description of Artificial Sequence:  Enzymatic Nucleic acid
agaattcaggctagctacaacgacccctccg

SEQ ID NO: 7536 - DNA, 31 bp, Artificial Sequence
  Description of Artificial Sequence:  Enzymatic Nucleic acid
aggaagaaggctagctacaacgatcatcccc

SEQ ID NO: 7537 - DNA, 31 bp, Artificial Sequence
  Description of Artificial Sequence:  Enzymatic Nucleic acid
aaagtaagggctagctacaacgactaaggaa

SEQ ID NO: 7538 - DNA, 31 bp, Artificial Sequence
  Description of Artificial Sequence:  Enzymatic Nucleic acid
tacaaaagggctagctacaacgaaagtctaa

SEQ ID NO: 7539 - DNA, 31 bp, Artificial Sequence
  Description of Artificial Sequence:  Enzymatic Nucleic acid
catttttaggctagctacaacgaaaaagtaa

SEQ ID NO: 7540 - DNA, 31 bp, Artificial Sequence
  Description of Artificial Sequence:  Enzymatic Nucleic acid
tggggacaggctagctacaacgattttacaa

SEQ ID NO: 7541 - DNA, 31 bp, Artificial Sequence
  Description of Artificial Sequence:  Enzymatic Nucleic acid
cgtggggaggctagctacaacgaatttttac

SEQ ID NO: 7542 - DNA, 31 bp, Artificial Sequence
  Description of Artificial Sequence:  Enzymatic Nucleic acid
aagtaccgggctagctacaacgaggggacat

SEQ ID NO: 7543 - DNA, 31 bp, Artificial Sequence
  Description of Artificial Sequence:  Enzymatic Nucleic acid
agtaagtaggctagctacaacgacgtgggga

SEQ ID NO: 7544 - DNA, 31 bp, Artificial Sequence
  Description of Artificial Sequence:  Enzymatic Nucleic acid
ggagtaagggctagctacaacgaaccgtggg

SEQ ID NO: 7545 - DNA, 31 bp, Artificial Sequence
  Description of Artificial Sequence:  Enzymatic Nucleic acid
gtggggagggctagctacaacgaaagtaccg

SEQ ID NO: 7546 - DNA, 31 bp, Artificial Sequence
  Description of Artificial Sequence:  Enzymatic Nucleic acid
tccatcagggctagctacaacgaggggagta

SEQ ID NO: 7547 - DNA, 31 bp, Artificial Sequence
  Description of Artificial Sequence:  Enzymatic Nucleic acid
ctggtccaggctagctacaacgacagtgggg

SEQ ID NO: 7548 - DNA, 31 bp, Artificial Sequence
  Description of Artificial Sequence:  Enzymatic Nucleic acid
accactggggctagctacaacgaccatcagt

SEQ ID NO: 7549 - DNA, 31 bp, Artificial Sequence
  Description of Artificial Sequence:  Enzymatic Nucleic acid
ggaaaccaggctagctacaacgatggtccat

SEQ ID NO: 7550 - DNA, 31 bp, Artificial Sequence
  Description of Artificial Sequence:  Enzymatic Nucleic acid
actggaaaggctagctacaacgacactggtc

SEQ ID NO: 7551 - DNA, 31 bp, Artificial Sequence
  Description of Artificial Sequence:  Enzymatic Nucleic acid
gctcatgaggctagctacaacgatggaaacc

SEQ ID NO: 7552 - DNA, 31 bp, Artificial Sequence
  Description of Artificial Sequence:  Enzymatic Nucleic acid
aacgctcaggctagctacaacgagactggaa

SEQ ID NO: 7553 - DNA, 31 bp, Artificial Sequence
  Description of Artificial Sequence:  Enzymatic Nucleic acid
gtctaacgggctagctacaacgatcatgact

SEQ ID NO: 7554 - DNA, 31 bp, Artificial Sequence
  Description of Artificial Sequence:  Enzymatic Nucleic acid
cagtctaaggctagctacaacgagctcatga

SEQ ID NO: 7555 - DNA, 31 bp, Artificial Sequence
  Description of Artificial Sequence:  Enzymatic Nucleic acid
caagtcagggctagctacaacgactaacgct

SEQ ID NO: 7556 - DNA, 31 bp, Artificial Sequence
  Description of Artificial Sequence:  Enzymatic Nucleic acid
caaacaagggctagctacaacgacagtctaa

SEQ ID NO: 7557 - DNA, 31 bp, Artificial Sequence
  Description of Artificial Sequence:  Enzymatic Nucleic acid
aagacaaaggctagctacaacgaaagtcagt

SEQ ID NO: 7558 - DNA, 31 bp, Artificial Sequence
  Description of Artificial Sequence:  Enzymatic Nucleic acid
atggaagaggctagctacaacgaaaacaagt

SEQ ID NO: 7559 - DNA, 31 bp, Artificial Sequence
  Description of Artificial Sequence:  Enzymatic Nucleic acid
caatggaaggctagctacaacgaggaagaca

SEQ ID NO: 7560 - DNA, 31 bp, Artificial Sequence
  Description of Artificial Sequence:  Enzymatic Nucleic acid
caaaacaaggctagctacaacgaggaatgga

SEQ ID NO: 7561 - DNA, 31 bp, Artificial Sequence
  Description of Artificial Sequence:  Enzymatic Nucleic acid
tttcaaaaggctagctacaacgaaatggaat

SEQ ID NO: 7562 - DNA, 31 bp, Artificial Sequence
  Description of Artificial Sequence:  Enzymatic Nucleic acid
atactgagggctagctacaacgattcaaaac

SEQ ID NO: 7563 - DNA, 31 bp, Artificial Sequence
  Description of Artificial Sequence:  Enzymatic Nucleic acid
gcggcataggctagctacaacgatgagtttc

SEQ ID NO: 7564 - DNA, 31 bp, Artificial Sequence
  Description of Artificial Sequence:  Enzymatic Nucleic acid
gggcggcaggctagctacaacgaactgagtt

SEQ ID NO: 7565 - DNA, 31 bp, Artificial Sequence
  Description of Artificial Sequence:  Enzymatic Nucleic acid
aggggcggggctagctacaacgaatactgag

SEQ ID NO: 7566 - DNA, 31 bp, Artificial Sequence
  Description of Artificial Sequence:  Enzymatic Nucleic acid
gacaggggggctagctacaacgaggcatact

SEQ ID NO: 7567 - DNA, 31 bp, Artificial Sequence
  Description of Artificial Sequence:  Enzymatic Nucleic acid
cagcaagaggctagctacaacgaaggggcgg

SEQ ID NO: 7568 - DNA, 31 bp, Artificial Sequence
  Description of Artificial Sequence:  Enzymatic Nucleic acid
catgacagggctagctacaacgaaagacagg

SEQ ID NO: 7569 - DNA, 31 bp, Artificial Sequence
  Description of Artificial Sequence:  Enzymatic Nucleic acid
tttcatgaggctagctacaacgaagcaagac

SEQ ID NO: 7570 - DNA, 31 bp, Artificial Sequence
  Description of Artificial Sequence:  Enzymatic Nucleic acid
tgatttcaggctagctacaacgagacagcaa

SEQ ID NO: 7571 - DNA, 31 bp, Artificial Sequence
  Description of Artificial Sequence:  Enzymatic Nucleic acid
cttgctgaggctagctacaacgattcatgac

SEQ ID NO: 7572 - DNA, 31 bp, Artificial Sequence
  Description of Artificial Sequence:  Enzymatic Nucleic acid
ctctcttgggctagctacaacgatgatttca

SEQ ID NO: 7573 - DNA, 31 bp, Artificial Sequence
  Description of Artificial Sequence:  Enzymatic Nucleic acid
atgtgtcaggctagctacaacgacctctctt

SEQ ID NO: 7574 - DNA, 31 bp, Artificial Sequence
  Description of Artificial Sequence:  Enzymatic Nucleic acid
ttgatgtgggctagctacaacgacatcctct

SEQ ID NO: 7575 - DNA, 31 bp, Artificial Sequence
  Description of Artificial Sequence:  Enzymatic Nucleic acid
atttgatgggctagctacaacgagtcatcct

SEQ ID NO: 7576 - DNA, 31 bp, Artificial Sequence
  Description of Artificial Sequence:  Enzymatic Nucleic acid
ttatttgaggctagctacaacgagtgtcatc

SEQ ID NO: 7577 - DNA, 31 bp, Artificial Sequence
  Description of Artificial Sequence:  Enzymatic Nucleic acid
agttattaggctagctacaacgattgatgtg

SEQ ID NO: 7578 - DNA, 31 bp, Artificial Sequence
  Description of Artificial Sequence:  Enzymatic Nucleic acid
ccgagttaggctagctacaacgatatttgat

SEQ ID NO: 7579 - DNA, 31 bp, Artificial Sequence
  Description of Artificial Sequence:  Enzymatic Nucleic acid
aatccgagggctagctacaacgatattattt

SEQ ID NO: 7580 - DNA, 31 bp, Artificial Sequence
  Description of Artificial Sequence:  Enzymatic Nucleic acid
ggctggaaggctagctacaacgaccgagtta

SEQ ID NO: 7581 - DNA, 31 bp, Artificial Sequence
  Description of Artificial Sequence:  Enzymatic Nucleic acid
aatgtgggggctagctacaacgatggaatcc

SEQ ID NO: 7582 - DNA, 31 bp, Artificial Sequence
  Description of Artificial Sequence:  Enzymatic Nucleic acid
atccaatgggctagctacaacgagggctgga

SEQ ID NO: 7583 - DNA, 31 bp, Artificial Sequence
  Description of Artificial Sequence:  Enzymatic Nucleic acid
gaatccaaggctagctacaacgagtgggctg

SEQ ID NO: 7584 - DNA, 31 bp, Artificial Sequence
  Description of Artificial Sequence:  Enzymatic Nucleic acid
ctgatgaaggctagctacaacgaccaatgtg

SEQ ID NO: 7585 - DNA, 31 bp, Artificial Sequence
  Description of Artificial Sequence:  Enzymatic Nucleic acid
aatgctgaggctagctacaacgagaatccaa

SEQ ID NO: 7586 - DNA, 31 bp, Artificial Sequence
  Description of Artificial Sequence:  Enzymatic Nucleic acid
tccaaatgggctagctacaacgatgatgaat

SEQ ID NO: 7587 - DNA, 31 bp, Artificial Sequence
  Description of Artificial Sequence:  Enzymatic Nucleic acid
ggtccaaaggctagctacaacgagctgatga

SEQ ID NO: 7588 - DNA, 31 bp, Artificial Sequence
  Description of Artificial Sequence:  Enzymatic Nucleic acid
gctattggggctagctacaacgaccaaatgc

SEQ ID NO: 7589 - DNA, 31 bp, Artificial Sequence
  Description of Artificial Sequence:  Enzymatic Nucleic acid
gtgggctaggctagctacaacgatggtccaa

SEQ ID NO: 7590 - DNA, 31 bp, Artificial Sequence
  Description of Artificial Sequence:  Enzymatic Nucleic acid
gctgtgggggctagctacaacgatattggtc

SEQ ID NO: 7591 - DNA, 31 bp, Artificial Sequence
  Description of Artificial Sequence:  Enzymatic Nucleic acid
ctcagctgggctagctacaacgagggctatt

SEQ ID NO: 7592 - DNA, 31 bp, Artificial Sequence
  Description of Artificial Sequence:  Enzymatic Nucleic acid
attctcagggctagctacaacgatgtgggct

SEQ ID NO: 7593 - DNA, 31 bp, Artificial Sequence
  Description of Artificial Sequence:  Enzymatic Nucleic acid
attccacaggctagctacaacgatctcagct

SEQ ID NO: 7594 - DNA, 31 bp, Artificial Sequence
  Description of Artificial Sequence:  Enzymatic Nucleic acid
gtattccaggctagctacaacgaattctcag

SEQ ID NO: 7595 - DNA, 31 bp, Artificial Sequence
  Description of Artificial Sequence:  Enzymatic Nucleic acid
cttaggtaggctagctacaacgatccacatt

SEQ ID NO: 7596 - DNA, 31 bp, Artificial Sequence
  Description of Artificial Sequence:  Enzymatic Nucleic acid
tccttaggggctagctacaacgaattccaca

SEQ ID NO: 7597 - DNA, 31 bp, Artificial Sequence
  Description of Artificial Sequence:  Enzymatic Nucleic acid
cggtgttaggctagctacaacgaccttaggt

SEQ ID NO: 7598 - DNA, 31 bp, Artificial Sequence
  Description of Artificial Sequence:  Enzymatic Nucleic acid
aagcggtgggctagctacaacgatatcctta

SEQ ID NO: 7599 - DNA, 31 bp, Artificial Sequence
  Description of Artificial Sequence:  Enzymatic Nucleic acid
aaaagcggggctagctacaacgagttatcct

SEQ ID NO: 7600 - DNA, 31 bp, Artificial Sequence
  Description of Artificial Sequence:  Enzymatic Nucleic acid
aacaaaagggctagctacaacgaggtgttat

SEQ ID NO: 7601 - DNA, 31 bp, Artificial Sequence
  Description of Artificial Sequence:  Enzymatic Nucleic acid
tgcgagaaggctagctacaacgaaaaagcgg

SEQ ID NO: 7602 - DNA, 31 bp, Artificial Sequence
  Description of Artificial Sequence:  Enzymatic Nucleic acid
cgtttttgggctagctacaacgagagaacaa

SEQ ID NO: 7603 - DNA, 31 bp, Artificial Sequence
  Description of Artificial Sequence:  Enzymatic Nucleic acid
gagatacgggctagctacaacgattttgcga

SEQ ID NO: 7604 - DNA, 31 bp, Artificial Sequence
  Description of Artificial Sequence:  Enzymatic Nucleic acid
aggagataggctagctacaacgagtttttgc

SEQ ID NO: 7605 - DNA, 31 bp, Artificial Sequence
  Description of Artificial Sequence:  Enzymatic Nucleic acid
ttaggagaggctagctacaacgaacgttttt

SEQ ID NO: 7606 - DNA, 31 bp, Artificial Sequence
  Description of Artificial Sequence:  Enzymatic Nucleic acid
gcctcaaaggctagctacaacgataggagat

SEQ ID NO: 7607 - DNA, 31 bp, Artificial Sequence
  Description of Artificial Sequence:  Enzymatic Nucleic acid
catctgagggctagctacaacgactcaaatt

SEQ ID NO: 7608 - DNA, 31 bp, Artificial Sequence
  Description of Artificial Sequence:  Enzymatic Nucleic acid
gcatttcaggctagctacaacgactgagcct

SEQ ID NO: 7609 - DNA, 31 bp, Artificial Sequence
  Description of Artificial Sequence:  Enzymatic Nucleic acid
ctgatgcaggctagctacaacgattcatctg

SEQ ID NO: 7610 - DNA, 31 bp, Artificial Sequence
  Description of Artificial Sequence:  Enzymatic Nucleic acid
acctgatgggctagctacaacgaatttcatc

SEQ ID NO: 7611 - DNA, 31 bp, Artificial Sequence
  Description of Artificial Sequence:  Enzymatic Nucleic acid
ggacctgaggctagctacaacgagcatttca

SEQ ID NO: 7612 - DNA, 31 bp, Artificial Sequence
  Description of Artificial Sequence:  Enzymatic Nucleic acid
ccaaaggaggctagctacaacgactgatgca

SEQ ID NO: 7613 - DNA, 31 bp, Artificial Sequence
  Description of Artificial Sequence:  Enzymatic Nucleic acid
gatctatgggctagctacaacgacccaaagg

SEQ ID NO: 7614 - DNA, 31 bp, Artificial Sequence
  Description of Artificial Sequence:  Enzymatic Nucleic acid
ctgatctaggctagctacaacgagccccaaa

SEQ ID NO: 7615 - DNA, 31 bp, Artificial Sequence
  Description of Artificial Sequence:  Enzymatic Nucleic acid
tcttctgaggctagctacaacgactatgccc

SEQ ID NO: 7616 - DNA, 31 bp, Artificial Sequence
  Description of Artificial Sequence:  Enzymatic Nucleic acid
ttttgtagggctagctacaacgacttctgat

SEQ ID NO: 7617 - DNA, 31 bp, Artificial Sequence
  Description of Artificial Sequence:  Enzymatic Nucleic acid
catttttgggctagctacaacgaagtcttct

SEQ ID NO: 7618 - DNA, 31 bp, Artificial Sequence
  Description of Artificial Sequence:  Enzymatic Nucleic acid
cagcttcaggctagctacaacgattttgtag

SEQ ID NO: 7619 - DNA, 31 bp, Artificial Sequence
  Description of Artificial Sequence:  Enzymatic Nucleic acid
cagagcagggctagctacaacgattcatttt

SEQ ID NO: 7620 - DNA, 31 bp, Artificial Sequence
  Description of Artificial Sequence:  Enzymatic Nucleic acid
tttcagagggctagctacaacgaagcttcat

SEQ ID NO: 7621 - DNA, 31 bp, Artificial Sequence
  Description of Artificial Sequence:  Enzymatic Nucleic acid
aaaggagaggctagctacaacgattcagagc

SEQ ID NO: 7622 - DNA, 31 bp, Artificial Sequence
  Description of Artificial Sequence:  Enzymatic Nucleic acid
ggtgatggggctagctacaacgataaaggag

SEQ ID NO: 7623 - DNA, 31 bp, Artificial Sequence
  Description of Artificial Sequence:  Enzymatic Nucleic acid
tggggtgaggctagctacaacgaggctaaag

SEQ ID NO: 7624 - DNA, 31 bp, Artificial Sequence
  Description of Artificial Sequence:  Enzymatic Nucleic acid
ggttggggggctagctacaacgagatggcta

SEQ ID NO: 7625 - DNA, 31 bp, Artificial Sequence
  Description of Artificial Sequence:  Enzymatic Nucleic acid
ttggggggggctagctacaacgatggggtga

SEQ ID NO: 7626 - DNA, 31 bp, Artificial Sequence
  Description of Artificial Sequence:  Enzymatic Nucleic acid
caaactaaggctagctacaacgatttggggg

SEQ ID NO: 7627 - DNA, 31 bp, Artificial Sequence
  Description of Artificial Sequence:  Enzymatic Nucleic acid
aacacaaaggctagctacaacgataattttg

SEQ ID NO: 7628 - DNA, 31 bp, Artificial Sequence
  Description of Artificial Sequence:  Enzymatic Nucleic acid
aagtaacaggctagctacaacgaaaactaat

SEQ ID NO: 7629 - DNA, 31 bp, Artificial Sequence
  Description of Artificial Sequence:  Enzymatic Nucleic acid
ataagtaaggctagctacaacgaacaaacta

SEQ ID NO: 7630 - DNA, 31 bp, Artificial Sequence
  Description of Artificial Sequence:  Enzymatic Nucleic acid
tccataagggctagctacaacgaaacacaaa

SEQ ID NO: 7631 - DNA, 31 bp, Artificial Sequence
  Description of Artificial Sequence:  Enzymatic Nucleic acid
atcttccaggctagctacaacgaaagtaaca

SEQ ID NO: 7632 - DNA, 31 bp, Artificial Sequence
  Description of Artificial Sequence:  Enzymatic Nucleic acid
gaaaactaggctagctacaacgacttccata

SEQ ID NO: 7633 - DNA, 31 bp, Artificial Sequence
  Description of Artificial Sequence:  Enzymatic Nucleic acid
ggagaaaaggctagctacaacgatatcttcc

SEQ ID NO: 7634 - DNA, 31 bp, Artificial Sequence
  Description of Artificial Sequence:  Enzymatic Nucleic acid
aagtgaagggctagctacaacgaaaaaggag

SEQ ID NO: 7635 - DNA, 31 bp, Artificial Sequence
  Description of Artificial Sequence:  Enzymatic Nucleic acid
ttttgaagggctagctacaacgagaagtaaa

SEQ ID NO: 7636 - DNA, 31 bp, Artificial Sequence
  Description of Artificial Sequence:  Enzymatic Nucleic acid
gtaaaaagggctagctacaacgattttgaag

SEQ ID NO: 7637 - DNA, 31 bp, Artificial Sequence
  Description of Artificial Sequence:  Enzymatic Nucleic acid
tctttgagggctagctacaacgaaaaaagct

SEQ ID NO: 7638 - DNA, 31 bp, Artificial Sequence
  Description of Artificial Sequence:  Enzymatic Nucleic acid
aacatataggctagctacaacgatctttgag

SEQ ID NO: 7639 - DNA, 31 bp, Artificial Sequence
  Description of Artificial Sequence:  Enzymatic Nucleic acid
ggaacataggctagctacaacgaactctttg

SEQ ID NO: 7640 - DNA, 31 bp, Artificial Sequence
  Description of Artificial Sequence:  Enzymatic Nucleic acid
agggaacaggctagctacaacgaatactctt

SEQ ID NO: 7641 - DNA, 31 bp, Artificial Sequence
  Description of Artificial Sequence:  Enzymatic Nucleic acid
ggagggaaggctagctacaacgaatatactc

SEQ ID NO: 7642 - DNA, 31 bp, Artificial Sequence
  Description of Artificial Sequence:  Enzymatic Nucleic acid
gcagctgaggctagctacaacgactggaggg

SEQ ID NO: 7643 - DNA, 31 bp, Artificial Sequence
  Description of Artificial Sequence:  Enzymatic Nucleic acid
gggggcagggctagctacaacgatgacctgg

SEQ ID NO: 7644 - DNA, 31 bp, Artificial Sequence
  Description of Artificial Sequence:  Enzymatic Nucleic acid
tttgggggggctagctacaacgaagctgacc

SEQ ID NO: 7645 - DNA, 31 bp, Artificial Sequence
  Description of Artificial Sequence:  Enzymatic Nucleic acid
ggagggggggctagctacaacgattgggggc

SEQ ID NO: 7646 - DNA, 31 bp, Artificial Sequence
  Description of Artificial Sequence:  Enzymatic Nucleic acid
acaaagcgggctagctacaacgaaaggaggg

SEQ ID NO: 7647 - DNA, 31 bp, Artificial Sequence
  Description of Artificial Sequence:  Enzymatic Nucleic acid
tgacaaagggctagctacaacgagtaaggag

SEQ ID NO: 7648 - DNA, 31 bp, Artificial Sequence
  Description of Artificial Sequence:  Enzymatic Nucleic acid
ttgtgtgaggctagctacaacgaaaagcgta

SEQ ID NO: 7649 - DNA, 31 bp, Artificial Sequence
  Description of Artificial Sequence:  Enzymatic Nucleic acid
tttttgtgggctagctacaacgagacaaagc

SEQ ID NO: 7650 - DNA, 31 bp, Artificial Sequence
  Description of Artificial Sequence:  Enzymatic Nucleic acid
actttttgggctagctacaacgagtgacaaa

SEQ ID NO: 7651 - DNA, 31 bp, Artificial Sequence
  Description of Artificial Sequence:  Enzymatic Nucleic acid
cagagacaggctagctacaacgatttttgtg

SEQ ID NO: 7652 - DNA, 31 bp, Artificial Sequence
  Description of Artificial Sequence:  Enzymatic Nucleic acid
ggcagagaggctagctacaacgaactttttg

SEQ ID NO: 7653 - DNA, 31 bp, Artificial Sequence
  Description of Artificial Sequence:  Enzymatic Nucleic acid
actcaaggggctagctacaacgaagagacac

SEQ ID NO: 7654 - DNA, 31 bp, Artificial Sequence
  Description of Artificial Sequence:  Enzymatic Nucleic acid
atagatgaggctagctacaacgatcaaggca

SEQ ID NO: 7655 - DNA, 31 bp, Artificial Sequence
  Description of Artificial Sequence:  Enzymatic Nucleic acid
tgaatagaggctagctacaacgagactcaag

SEQ ID NO: 7656 - DNA, 31 bp, Artificial Sequence
  Description of Artificial Sequence:  Enzymatic Nucleic acid
tgcttgaaggctagctacaacgaagatgact

SEQ ID NO: 7657 - DNA, 31 bp, Artificial Sequence
  Description of Artificial Sequence:  Enzymatic Nucleic acid
tgtaagtgggctagctacaacgattgaatag

SEQ ID NO: 7658 - DNA, 31 bp, Artificial Sequence
  Description of Artificial Sequence:  Enzymatic Nucleic acid
gctgtaagggctagctacaacgagcttgaat

SEQ ID NO: 7659 - DNA, 31 bp, Artificial Sequence
  Description of Artificial Sequence:  Enzymatic Nucleic acid
cagagctgggctagctacaacgaaagtgctt

SEQ ID NO: 7660 - DNA, 31 bp, Artificial Sequence
  Description of Artificial Sequence:  Enzymatic Nucleic acid
ggccagagggctagctacaacgatgtaagtg

SEQ ID NO: 7661 - DNA, 31 bp, Artificial Sequence
  Description of Artificial Sequence:  Enzymatic Nucleic acid
tgttgtggggctagctacaacgacagagctg

SEQ ID NO: 7662 - DNA, 31 bp, Artificial Sequence
  Description of Artificial Sequence:  Enzymatic Nucleic acid
ccctgttgggctagctacaacgaggccagag

SEQ ID NO: 7663 - DNA, 31 bp, Artificial Sequence
  Description of Artificial Sequence:  Enzymatic Nucleic acid
atgccctgggctagctacaacgatgtggcca

SEQ ID NO: 7664 - DNA, 31 bp, Artificial Sequence
  Description of Artificial Sequence:  Enzymatic Nucleic acid
gtaaaatgggctagctacaacgacctgttgt

SEQ ID NO: 7665 - DNA, 31 bp, Artificial Sequence
  Description of Artificial Sequence:  Enzymatic Nucleic acid
ctgtaaaaggctagctacaacgagccctgtt

SEQ ID NO: 7666 - DNA, 31 bp, Artificial Sequence
  Description of Artificial Sequence:  Enzymatic Nucleic acid
cgcacctgggctagctacaacgaaaaatgcc

SEQ ID NO: 7667 - DNA, 31 bp, Artificial Sequence
  Description of Artificial Sequence:  Enzymatic Nucleic acid
cattcgcaggctagctacaacgactgtaaaa

SEQ ID NO: 7668 - DNA, 31 bp, Artificial Sequence
  Description of Artificial Sequence:  Enzymatic Nucleic acid
gtcattcgggctagctacaacgaacctgtaa

SEQ ID NO: 7669 - DNA, 31 bp, Artificial Sequence
  Description of Artificial Sequence:  Enzymatic Nucleic acid
tactgtcaggctagctacaacgatcgcacct

SEQ ID NO: 7670 - DNA, 31 bp, Artificial Sequence
  Description of Artificial Sequence:  Enzymatic Nucleic acid
tgctactgggctagctacaacgacattcgca

SEQ ID NO: 7671 - DNA, 31 bp, Artificial Sequence
  Description of Artificial Sequence:  Enzymatic Nucleic acid
taatgctaggctagctacaacgatgtcattc

SEQ ID NO: 7672 - DNA, 31 bp, Artificial Sequence
  Description of Artificial Sequence:  Enzymatic Nucleic acid
tcataatgggctagctacaacgatactgtca

SEQ ID NO: 7673 - DNA, 31 bp, Artificial Sequence
  Description of Artificial Sequence:  Enzymatic Nucleic acid
actcataaggctagctacaacgagctactgt

SEQ ID NO: 7674 - DNA, 31 bp, Artificial Sequence
  Description of Artificial Sequence:  Enzymatic Nucleic acid
actactcaggctagctacaacgaaatgctac

SEQ ID NO: 7675 - DNA, 31 bp, Artificial Sequence
  Description of Artificial Sequence:  Enzymatic Nucleic acid
tcacactaggctagctacaacgatcataatg

SEQ ID NO: 7676 - DNA, 31 bp, Artificial Sequence
  Description of Artificial Sequence:  Enzymatic Nucleic acid
aattcacaggctagctacaacgatactcata

SEQ ID NO: 7677 - DNA, 31 bp, Artificial Sequence
  Description of Artificial Sequence:  Enzymatic Nucleic acid
tgaattcaggctagctacaacgaactactca

SEQ ID NO: 7678 - DNA, 31 bp, Artificial Sequence
  Description of Artificial Sequence:  Enzymatic Nucleic acid
tacctgaaggctagctacaacgatcacacta

SEQ ID NO: 7679 - DNA, 31 bp, Artificial Sequence
  Description of Artificial Sequence:  Enzymatic Nucleic acid
atttactaggctagctacaacgactgaattc

SEQ ID NO: 7680 - DNA, 31 bp, Artificial Sequence
  Description of Artificial Sequence:  Enzymatic Nucleic acid
catatttaggctagctacaacgatacctgaa

SEQ ID NO: 7681 - DNA, 31 bp, Artificial Sequence
  Description of Artificial Sequence:  Enzymatic Nucleic acid
gtttcataggctagctacaacgattactacc

SEQ ID NO: 7682 - DNA, 31 bp, Artificial Sequence
  Description of Artificial Sequence:  Enzymatic Nucleic acid
tagtttcaggctagctacaacgaatttacta

SEQ ID NO: 7683 - DNA, 31 bp, Artificial Sequence
  Description of Artificial Sequence:  Enzymatic Nucleic acid
aaccctagggctagctacaacgattcatatt

SEQ ID NO: 7684 - DNA, 31 bp, Artificial Sequence
  Description of Artificial Sequence:  Enzymatic Nucleic acid
atttcaaaggctagctacaacgacctagttt

SEQ ID NO: 7685 - DNA, 31 bp, Artificial Sequence
  Description of Artificial Sequence:  Enzymatic Nucleic acid
attatcaaggctagctacaacgattcaaacc

SEQ ID NO: 7686 - DNA, 31 bp, Artificial Sequence
  Description of Artificial Sequence:  Enzymatic Nucleic acid
aagcattaggctagctacaacgacaatttca

SEQ ID NO: 7687 - DNA, 31 bp, Artificial Sequence
  Description of Artificial Sequence:  Enzymatic Nucleic acid
tgaaagcaggctagctacaacgatatcaatt

SEQ ID NO: 7688 - DNA, 31 bp, Artificial Sequence
  Description of Artificial Sequence:  Enzymatic Nucleic acid
tgtgaaagggctagctacaacgaattatcaa

SEQ ID NO: 7689 - DNA, 31 bp, Artificial Sequence
  Description of Artificial Sequence:  Enzymatic Nucleic acid
aaatgttgggctagctacaacgagaaagcat

SEQ ID NO: 7690 - DNA, 31 bp, Artificial Sequence
  Description of Artificial Sequence:  Enzymatic Nucleic acid
tgcaaatgggctagctacaacgatgtgaaag

SEQ ID NO: 7691 - DNA, 31 bp, Artificial Sequence
  Description of Artificial Sequence:  Enzymatic Nucleic acid
tctgcaaaggctagctacaacgagttgtgaa

SEQ ID NO: 7692 - DNA, 31 bp, Artificial Sequence
  Description of Artificial Sequence:  Enzymatic Nucleic acid
aacatctgggctagctacaacgaaaatgttg

SEQ ID NO: 7693 - DNA, 31 bp, Artificial Sequence
  Description of Artificial Sequence:  Enzymatic Nucleic acid
ctaaaacaggctagctacaacgactgcaaat

SEQ ID NO: 7694 - DNA, 31 bp, Artificial Sequence
  Description of Artificial Sequence:  Enzymatic Nucleic acid
ttctaaaaggctagctacaacgaatctgcaa

SEQ ID NO: 7695 - DNA, 31 bp, Artificial Sequence
  Description of Artificial Sequence:  Enzymatic Nucleic acid
ggaaggaaggctagctacaacgattttttcc

SEQ ID NO: 7696 - DNA, 31 bp, Artificial Sequence
  Description of Artificial Sequence:  Enzymatic Nucleic acid
agaaattaggctagctacaacgatttaggaa

SEQ ID NO: 7697 - DNA, 31 bp, Artificial Sequence
  Description of Artificial Sequence:  Enzymatic Nucleic acid
tagagaaaggctagctacaacgatattttag

SEQ ID NO: 7698 - DNA, 31 bp, Artificial Sequence
  Description of Artificial Sequence:  Enzymatic Nucleic acid
tccaattgggctagctacaacgaagagaaat

SEQ ID NO: 7699 - DNA, 31 bp, Artificial Sequence
  Description of Artificial Sequence:  Enzymatic Nucleic acid
tcttccaaggctagctacaacgatgtagaga

SEQ ID NO: 7700 - DNA, 31 bp, Artificial Sequence
  Description of Artificial Sequence:  Enzymatic Nucleic acid
tcttccaaggctagctacaacgacttccaat

SEQ ID NO: 7701 - DNA, 31 bp, Artificial Sequence
  Description of Artificial Sequence:  Enzymatic Nucleic acid
tagctgaaggctagctacaacgacttccaat

SEQ ID NO: 7702 - DNA, 31 bp, Artificial Sequence
  Description of Artificial Sequence:  Enzymatic Nucleic acid
ctaactagggctagctacaacgatgaatctt

SEQ ID NO: 7703 - DNA, 31 bp, Artificial Sequence
  Description of Artificial Sequence:  Enzymatic Nucleic acid
gctcctaaggctagctacaacgatagctgaa

SEQ ID NO: 7704 - DNA, 31 bp, Artificial Sequence
  Description of Artificial Sequence:  Enzymatic Nucleic acid
aaaatgggggctagctacaacgatcctaact

SEQ ID NO: 7705 - DNA, 31 bp, Artificial Sequence
  Description of Artificial Sequence:  Enzymatic Nucleic acid
ggaaaaaaggctagctacaacgagggctcct

SEQ ID NO: 7706 - DNA, 31 bp, Artificial Sequence
  Description of Artificial Sequence:  Enzymatic Nucleic acid
cacacagaggctagctacaacgataggaaaa

SEQ ID NO: 7707 - DNA, 31 bp, Artificial Sequence
  Description of Artificial Sequence:  Enzymatic Nucleic acid
ggcacacaggctagctacaacgaagattagg

SEQ ID NO: 7708 - DNA, 31 bp, Artificial Sequence
  Description of Artificial Sequence:  Enzymatic Nucleic acid
agggcacaggctagctacaacgaacagatta

SEQ ID NO: 7709 - DNA, 31 bp, Artificial Sequence
  Description of Artificial Sequence:  Enzymatic Nucleic acid
acagggcaggctagctacaacgaacacagat

SEQ ID NO: 7710 - DNA, 31 bp, Artificial Sequence
  Description of Artificial Sequence:  Enzymatic Nucleic acid
ttacagggggctagctacaacgaacacacag

SEQ ID NO: 7711 - DNA, 31 bp, Artificial Sequence
  Description of Artificial Sequence:  Enzymatic Nucleic acid
tcaggttaggctagctacaacgaagggcaca

SEQ ID NO: 7712 - DNA, 31 bp, Artificial Sequence
  Description of Artificial Sequence:  Enzymatic Nucleic acid
cagtcaggggctagctacaacgatacagggc

SEQ ID NO: 7713 - DNA, 31 bp, Artificial Sequence
  Description of Artificial Sequence:  Enzymatic Nucleic acid
ttaaccagggctagctacaacgacaggttac

SEQ ID NO: 7714 - DNA, 31 bp, Artificial Sequence
  Description of Artificial Sequence:  Enzymatic Nucleic acid
gctgttaaggctagctacaacgacagtcagg

SEQ ID NO: 7715 - DNA, 31 bp, Artificial Sequence
  Description of Artificial Sequence:  Enzymatic Nucleic acid
gactgctgggctagctacaacgataaccagt

SEQ ID NO: 7716 - DNA, 31 bp, Artificial Sequence
  Description of Artificial Sequence:  Enzymatic Nucleic acid
aaggactgggctagctacaacgatgttaacc

SEQ ID NO: 7717 - DNA, 31 bp, Artificial Sequence
  Description of Artificial Sequence:  Enzymatic Nucleic acid
acaaaggaggctagctacaacgatgctgtta

SEQ ID NO: 7718 - DNA, 31 bp, Artificial Sequence
  Description of Artificial Sequence:  Enzymatic Nucleic acid
actgtttaggctagctacaacgaaaaggact

SEQ ID NO: 7719 - DNA, 31 bp, Artificial Sequence
  Description of Artificial Sequence:  Enzymatic Nucleic acid
aaacactgggctagctacaacgattacaaag

SEQ ID NO: 7720 - DNA, 31 bp, Artificial Sequence
  Description of Artificial Sequence:  Enzymatic Nucleic acid
ttaaaacaggctagctacaacgatgtttaca

SEQ ID NO: 7721 - DNA, 31 bp, Artificial Sequence
  Description of Artificial Sequence:  Enzymatic Nucleic acid
gtttaaaaggctagctacaacgaactgttta

SEQ ID NO: 7722 - DNA, 31 bp, Artificial Sequence
  Description of Artificial Sequence:  Enzymatic Nucleic acid
taggagagggctagctacaacgattaaaaca

SEQ ID NO: 7723 - DNA, 31 bp, Artificial Sequence
  Description of Artificial Sequence:  Enzymatic Nucleic acid
gatattgaggctagctacaacgataggagag

SEQ ID NO: 7724 - DNA, 31 bp, Artificial Sequence
  Description of Artificial Sequence:  Enzymatic Nucleic acid
ggtggataggctagctacaacgatgactagg

SEQ ID NO: 7725 - DNA, 31 bp, Artificial Sequence
  Description of Artificial Sequence:  Enzymatic Nucleic acid
ggggtggaggctagctacaacgaattgacta

SEQ ID NO: 7726 - DNA, 31 bp, Artificial Sequence
  Description of Artificial Sequence:  Enzymatic Nucleic acid
ggatggggggctagctacaacgaggatattg

SEQ ID NO: 7727 - DNA, 31 bp, Artificial Sequence
  Description of Artificial Sequence:  Enzymatic Nucleic acid
aaattggaggctagctacaacgaggggtgga

SEQ ID NO: 7728 - DNA, 31 bp, Artificial Sequence
  Description of Artificial Sequence:  Enzymatic Nucleic acid
ttgataaaggctagctacaacgatggatggg

SEQ ID NO: 7729 - DNA, 31 bp, Artificial Sequence
  Description of Artificial Sequence:  Enzymatic Nucleic acid
ttccttgaggctagctacaacgaaaattgga

SEQ ID NO: 7730 - DNA, 31 bp, Artificial Sequence
  Description of Artificial Sequence:  Enzymatic Nucleic acid
ctgaaccaggctagctacaacgattcttcct

SEQ ID NO: 7731 - DNA, 31 bp, Artificial Sequence
  Description of Artificial Sequence:  Enzymatic Nucleic acid
tttctgaaggctagctacaacgacatttctt

SEQ ID NO: 7732 - DNA, 31 bp, Artificial Sequence
  Description of Artificial Sequence:  Enzymatic Nucleic acid
tgaaaataggctagctacaacgatttctgaa

SEQ ID NO: 7733 - DNA, 31 bp, Artificial Sequence
  Description of Artificial Sequence:  Enzymatic Nucleic acid
gctgaaaaggctagctacaacgaattttctg

SEQ ID NO: 7734 - DNA, 31 bp, Artificial Sequence
  Description of Artificial Sequence:  Enzymatic Nucleic acid
actgtaggggctagctacaacgatgaaaata

SEQ ID NO: 7735 - DNA, 31 bp, Artificial Sequence
  Description of Artificial Sequence:  Enzymatic Nucleic acid
cataactgggctagctacaacgaaggctgaa

SEQ ID NO: 7736 - DNA, 31 bp, Artificial Sequence
  Description of Artificial Sequence:  Enzymatic Nucleic acid
gaacataaggctagctacaacgatgtaggct

SEQ ID NO: 7737 - DNA, 31 bp, Artificial Sequence
  Description of Artificial Sequence:  Enzymatic Nucleic acid
actgaacaggctagctacaacgaaactgtag

SEQ ID NO: 7738 - DNA, 31 bp, Artificial Sequence
  Description of Artificial Sequence:  Enzymatic Nucleic acid
tgactgaaggctagctacaacgaataactgt

SEQ ID NO: 7739 - DNA, 31 bp, Artificial Sequence
  Description of Artificial Sequence:  Enzymatic Nucleic acid
gtgtgtgaggctagctacaacgatgaacata

SEQ ID NO: 7740 - DNA, 31 bp, Artificial Sequence
  Description of Artificial Sequence:  Enzymatic Nucleic acid
tgtgtgtgggctagctacaacgagactgaac

SEQ ID NO: 7741 - DNA, 31 bp, Artificial Sequence
  Description of Artificial Sequence:  Enzymatic Nucleic acid
tatgtgtgggctagctacaacgagtgactga

SEQ ID NO: 7742 - DNA, 31 bp, Artificial Sequence
  Description of Artificial Sequence:  Enzymatic Nucleic acid
tgtatgtgggctagctacaacgagtgtgact

SEQ ID NO: 7743 - DNA, 31 bp, Artificial Sequence
  Description of Artificial Sequence:  Enzymatic Nucleic acid
tttgtatgggctagctacaacgagtgtgtga

SEQ ID NO: 7744 - DNA, 31 bp, Artificial Sequence
  Description of Artificial Sequence:  Enzymatic Nucleic acid
attttgtaggctagctacaacgagtgtgtgt

SEQ ID NO: 7745 - DNA, 31 bp, Artificial Sequence
  Description of Artificial Sequence:  Enzymatic Nucleic acid
acattttgggctagctacaacgaatgtgtgt

SEQ ID NO: 7746 - DNA, 31 bp, Artificial Sequence
  Description of Artificial Sequence:  Enzymatic Nucleic acid
aaggaacaggctagctacaacgatttgtatg

SEQ ID NO: 7747 - DNA, 31 bp, Artificial Sequence
  Description of Artificial Sequence:  Enzymatic Nucleic acid
aaaaggaaggctagctacaacgaattttgta

SEQ ID NO: 7748 - DNA, 31 bp, Artificial Sequence
  Description of Artificial Sequence:  Enzymatic Nucleic acid
tttaaaagggctagctacaacgaaaaaggaa

SEQ ID NO: 7749 - DNA, 31 bp, Artificial Sequence
  Description of Artificial Sequence:  Enzymatic Nucleic acid
aaaaattaggctagctacaacgatttaaaag

SEQ ID NO: 7750 - DNA, 31 bp, Artificial Sequence
  Description of Artificial Sequence:  Enzymatic Nucleic acid
gtcaaaaaggctagctacaacgatactttaa

SEQ ID NO: 7751 - DNA, 31 bp, Artificial Sequence
  Description of Artificial Sequence:  Enzymatic Nucleic acid
tctgggagggctagctacaacgacaaaaatt

SEQ ID NO: 7752 - DNA, 31 bp, Artificial Sequence
  Description of Artificial Sequence:  Enzymatic Nucleic acid
ctgactgaggctagctacaacgactgggagt

SEQ ID NO: 7753 - DNA, 31 bp, Artificial Sequence
  Description of Artificial Sequence:  Enzymatic Nucleic acid
ggctctgaggctagctacaacgatgatctgg

SEQ ID NO: 7754 - DNA, 31 bp, Artificial Sequence
  Description of Artificial Sequence:  Enzymatic Nucleic acid
tgtaggggggctagctacaacgatctgactg

SEQ ID NO: 7755 - DNA, 31 bp, Artificial Sequence
  Description of Artificial Sequence:  Enzymatic Nucleic acid
caatgctgggctagctacaacgaaggggctc

SEQ ID NO: 7756 - DNA, 31 bp, Artificial Sequence
  Description of Artificial Sequence:  Enzymatic Nucleic acid
taacaatgggctagctacaacgatgtagggg

SEQ ID NO: 7757 - DNA, 31 bp, Artificial Sequence
  Description of Artificial Sequence:  Enzymatic Nucleic acid
cttaacaaggctagctacaacgagctgtagg

SEQ ID NO: 7758 - DNA, 31 bp, Artificial Sequence
  Description of Artificial Sequence:  Enzymatic Nucleic acid
tttcttaaggctagctacaacgaaatgctgt

SEQ ID NO: 7759 - DNA, 31 bp, Artificial Sequence
  Description of Artificial Sequence:  Enzymatic Nucleic acid
atcaaataggctagctacaacgatttcttaa

SEQ ID NO: 7760 - DNA, 31 bp, Artificial Sequence
  Description of Artificial Sequence:  Enzymatic Nucleic acid
aaatcaaaggctagctacaacgaactttctt

SEQ ID NO: 7761 - DNA, 31 bp, Artificial Sequence
  Description of Artificial Sequence:  Enzymatic Nucleic acid
gacaaaaaggctagctacaacgacaaatact

SEQ ID NO: 7762 - DNA, 31 bp, Artificial Sequence
  Description of Artificial Sequence:  Enzymatic Nucleic acid
cattgagaggctagctacaacgaaaaaatca

SEQ ID NO: 7763 - DNA, 31 bp, Artificial Sequence
  Description of Artificial Sequence:  Enzymatic Nucleic acid
tattttcaggctagctacaacgatgagacaa

SEQ ID NO: 7764 - DNA, 31 bp, Artificial Sequence
  Description of Artificial Sequence:  Enzymatic Nucleic acid
tagttttaggctagctacaacgatttcattg

SEQ ID NO: 7765 - DNA, 31 bp, Artificial Sequence
  Description of Artificial Sequence:  Enzymatic Nucleic acid
gaatatagggctagctacaacgatttatttt

SEQ ID NO: 7766 - DNA, 31 bp, Artificial Sequence
  Description of Artificial Sequence:  Enzymatic Nucleic acid
aatgaataggctagctacaacgaagttttat

SEQ ID NO: 7767 - DNA, 31 bp, Artificial Sequence
  Description of Artificial Sequence:  Enzymatic Nucleic acid
gaaatgaaggctagctacaacgaatagtttt

SEQ ID NO: 7768 - RNA, 48 nt, Artificial Sequence
  Description of Artificial Sequence:  Enzymatic Nucleic acid
cuccggcgggaggaaacucccuucaaggacaucguccgggagcgcggc

SEQ ID NO: 7769 - RNA, 48 nt, Artificial Sequence
  Description of Artificial Sequence:  Enzymatic Nucleic acid
gacuccggggaggaaacucccuucaaggacaucguccggggcagcgcg

SEQ ID NO: 7770 - RNA, 48 nt, Artificial Sequence
  Description of Artificial Sequence:  Enzymatic Nucleic acid
cgggacucggaggaaacucccuucaaggacaucguccgggggcgcagc

SEQ ID NO: 7771 - RNA, 48 nt, Artificial Sequence
  Description of Artificial Sequence:  Enzymatic Nucleic acid
ucgggacuggaggaaacucccuucaaggacaucguccgggcggcgcag

SEQ ID NO: 7772 - RNA, 48 nt, Artificial Sequence
  Description of Artificial Sequence:  Enzymatic Nucleic acid
gcucgggaggaggaaacucccuucaaggacaucguccggguccggcgc

SEQ ID NO: 7773 - RNA, 48 nt, Artificial Sequence
  Description of Artificial Sequence:  Enzymatic Nucleic acid
ggcuagcuggaggaaacucccuucaaggacaucguccggggggacucc

SEQ ID NO: 7774 - RNA, 48 nt, Artificial Sequence
  Description of Artificial Sequence:  Enzymatic Nucleic acid
ggggcuagggaggaaacucccuucaaggacaucguccgggucgggacu

SEQ ID NO: 7775 - RNA, 48 nt, Artificial Sequence
  Description of Artificial Sequence:  Enzymatic Nucleic acid
cgccggggggaggaaacucccuucaaggacaucguccggguagcucgg

SEQ ID NO: 7776 - RNA, 48 nt, Artificial Sequence
  Description of Artificial Sequence:  Enzymatic Nucleic acid
ggcggcgcggaggaaacucccuucaaggacaucguccgggggggcuag

SEQ ID NO: 7777 - RNA, 48 nt, Artificial Sequence
  Description of Artificial Sequence:  Enzymatic Nucleic acid
cggcggcgggaggaaacucccuucaaggacaucguccgggcggggcua

SEQ ID NO: 7778 - RNA, 48 nt, Artificial Sequence
  Description of Artificial Sequence:  Enzymatic Nucleic acid
ggcggcggggaggaaacucccuucaaggacaucguccggggccggggc

SEQ ID NO: 7779 - RNA, 48 nt, Artificial Sequence
  Description of Artificial Sequence:  Enzymatic Nucleic acid
ggcggcggggaggaaacucccuucaaggacaucguccgggggcgccgg

SEQ ID NO: 7780 - RNA, 48 nt, Artificial Sequence
  Description of Artificial Sequence:  Enzymatic Nucleic acid
cugggcggggaggaaacucccuucaaggacaucguccgggggcggcgc

SEQ ID NO: 7781 - RNA, 48 nt, Artificial Sequence
  Description of Artificial Sequence:  Enzymatic Nucleic acid
ggucugggggaggaaacucccuucaaggacaucguccgggggcggcgg

SEQ ID NO: 7782 - RNA, 48 nt, Artificial Sequence
  Description of Artificial Sequence:  Enzymatic Nucleic acid
cguccgguggaggaaacucccuucaaggacaucguccgggugggcggc

SEQ ID NO: 7783 - RNA, 48 nt, Artificial Sequence
  Description of Artificial Sequence:  Enzymatic Nucleic acid
cugucgucggaggaaacucccuucaaggacaucguccgggggucuggg

SEQ ID NO: 7784 - RNA, 48 nt, Artificial Sequence
  Description of Artificial Sequence:  Enzymatic Nucleic acid
ccugucguggaggaaacucccuucaaggacaucguccgggcggucugg

SEQ ID NO: 7785 - RNA, 48 nt, Artificial Sequence
  Description of Artificial Sequence:  Enzymatic Nucleic acid
uggccuguggaggaaacucccuucaaggacaucguccgggguccgguc

SEQ ID NO: 7786 - RNA, 48 nt, Artificial Sequence
  Description of Artificial Sequence:  Enzymatic Nucleic acid
gagguggcggaggaaacucccuucaaggacaucguccgggugucgucc

SEQ ID NO: 7787 - RNA, 48 nt, Artificial Sequence
  Description of Artificial Sequence:  Enzymatic Nucleic acid
cgagguggggaggaaacucccuucaaggacaucguccgggcugucguc

SEQ ID NO: 7788 - RNA, 48 nt, Artificial Sequence
  Description of Artificial Sequence:  Enzymatic Nucleic acid
gacgccgaggaggaaacucccuucaaggacaucguccggggagguggc

SEQ ID NO: 7789 - RNA, 48 nt, Artificial Sequence
  Description of Artificial Sequence:  Enzymatic Nucleic acid
gcggacgcggaggaaacucccuucaaggacaucguccggggacgaggu

SEQ ID NO: 7790 - RNA, 48 nt, Artificial Sequence
  Description of Artificial Sequence:  Enzymatic Nucleic acid
ggcggacgggaggaaacucccuucaaggacaucguccgggcgacgagg

SEQ ID NO: 7791 - RNA, 48 nt, Artificial Sequence
  Description of Artificial Sequence:  Enzymatic Nucleic acid
cgggcggaggaggaaacucccuucaaggacaucguccggggccgacga

SEQ ID NO: 7792 - RNA, 48 nt, Artificial Sequence
  Description of Artificial Sequence:  Enzymatic Nucleic acid
gacucgggggaggaaacucccuucaaggacaucguccgggggacgccg

SEQ ID NO: 7793 - RNA, 48 nt, Artificial Sequence
  Description of Artificial Sequence:  Enzymatic Nucleic acid
cggggacuggaggaaacucccuucaaggacaucguccggggggcggac

SEQ ID NO: 7794 - RNA, 48 nt, Artificial Sequence
  Description of Artificial Sequence:  Enzymatic Nucleic acid
ggcggggaggaggaaacucccuucaaggacaucguccgggucgggcgg

SEQ ID NO: 7795 - RNA, 48 nt, Artificial Sequence
  Description of Artificial Sequence:  Enzymatic Nucleic acid
cggcgaggggaggaaacucccuucaaggacaucguccgggggggacuc

SEQ ID NO: 7796 - RNA, 48 nt, Artificial Sequence
  Description of Artificial Sequence:  Enzymatic Nucleic acid
guuggcggggaggaaacucccuucaaggacaucguccggggaggcggg

SEQ ID NO: 7797 - RNA, 48 nt, Artificial Sequence
  Description of Artificial Sequence:  Enzymatic Nucleic acid
ggcguuggggaggaaacucccuucaaggacaucguccgggggcgaggc

SEQ ID NO: 7798 - RNA, 48 nt, Artificial Sequence
  Description of Artificial Sequence:  Enzymatic Nucleic acid
gguuguggggaggaaacucccuucaaggacaucguccgggguuggcgg

SEQ ID NO: 7799 - RNA, 48 nt, Artificial Sequence
  Description of Artificial Sequence:  Enzymatic Nucleic acid
gccgugcgggaggaaacucccuucaaggacaucguccgggggugguug

SEQ ID NO: 7800 - RNA, 48 nt, Artificial Sequence
  Description of Artificial Sequence:  Enzymatic Nucleic acid
gggccgugggaggaaacucccuucaaggacaucguccggggcgguggu

SEQ ID NO: 7801 - RNA, 48 nt, Artificial Sequence
  Description of Artificial Sequence:  Enzymatic Nucleic acid
cagggggcggaggaaacucccuucaaggacaucguccggggugcgcgg

SEQ ID NO: 7802 - RNA, 48 nt, Artificial Sequence
  Description of Artificial Sequence:  Enzymatic Nucleic acid
ucagggggggaggaaacucccuucaaggacaucguccgggcgugcgcg

SEQ ID NO: 7803 - RNA, 48 nt, Artificial Sequence
  Description of Artificial Sequence:  Enzymatic Nucleic acid
gacggaguggaggaaacucccuucaaggacaucguccgggagggggcc

SEQ ID NO: 7804 - RNA, 48 nt, Artificial Sequence
  Description of Artificial Sequence:  Enzymatic Nucleic acid
auacuggaggaggaaacucccuucaaggacaucguccgggggagucag

SEQ ID NO: 7805 - RNA, 48 nt, Artificial Sequence
  Description of Artificial Sequence:  Enzymatic Nucleic acid
gaucaauaggaggaaacucccuucaaggacaucguccggguggacgga

SEQ ID NO: 7806 - RNA, 48 nt, Artificial Sequence
  Description of Artificial Sequence:  Enzymatic Nucleic acid
cucccgauggaggaaacucccuucaaggacaucguccgggaauacugg

SEQ ID NO: 7807 - RNA, 48 nt, Artificial Sequence
  Description of Artificial Sequence:  Enzymatic Nucleic acid
ggcucuccggaggaaacucccuucaaggacaucguccggggaucaaua

SEQ ID NO: 7808 - RNA, 48 nt, Artificial Sequence
  Description of Artificial Sequence:  Enzymatic Nucleic acid
cggcucucggaggaaacucccuucaaggacaucguccgggcgaucaau

SEQ ID NO: 7809 - RNA, 48 nt, Artificial Sequence
  Description of Artificial Sequence:  Enzymatic Nucleic acid
ccggcucuggaggaaacucccuucaaggacaucguccgggccgaucaa

SEQ ID NO: 7810 - RNA, 48 nt, Artificial Sequence
  Description of Artificial Sequence:  Enzymatic Nucleic acid
cuccggcuggaggaaacucccuucaaggacaucguccgggucccgauc

SEQ ID NO: 7811 - RNA, 48 nt, Artificial Sequence
  Description of Artificial Sequence:  Enzymatic Nucleic acid
cgcuccggggaggaaacucccuucaaggacaucguccgggucucccga

SEQ ID NO: 7812 - RNA, 48 nt, Artificial Sequence
  Description of Artificial Sequence:  Enzymatic Nucleic acid
gcucgcucggaggaaacucccuucaaggacaucguccgggggcucucc

SEQ ID NO: 7813 - RNA, 48 nt, Artificial Sequence
  Description of Artificial Sequence:  Enzymatic Nucleic acid
agcucgcuggaggaaacucccuucaaggacaucguccgggcggcucuc

SEQ ID NO: 7814 - RNA, 48 nt, Artificial Sequence
  Description of Artificial Sequence:  Enzymatic Nucleic acid
agagcucgggaggaaacucccuucaaggacaucguccggguccggcuc

SEQ ID NO: 7815 - RNA, 48 nt, Artificial Sequence
  Description of Artificial Sequence:  Enzymatic Nucleic acid
gaagagcuggaggaaacucccuucaaggacaucguccggggcuccggc

SEQ ID NO: 7816 - RNA, 48 nt, Artificial Sequence
  Description of Artificial Sequence:  Enzymatic Nucleic acid
ccgaagagggaggaaacucccuucaaggacaucguccgggucgcuccg

SEQ ID NO: 7817 - RNA, 48 nt, Artificial Sequence
  Description of Artificial Sequence:  Enzymatic Nucleic acid
cugcucccggaggaaacucccuucaaggacaucguccggggaagagcu

SEQ ID NO: 7818 - RNA, 48 nt, Artificial Sequence
  Description of Artificial Sequence:  Enzymatic Nucleic acid
gcugcuccggaggaaacucccuucaaggacaucguccgggcgaagagc

SEQ ID NO: 7819 - RNA, 48 nt, Artificial Sequence
  Description of Artificial Sequence:  Enzymatic Nucleic acid
cgcugcucggaggaaacucccuucaaggacaucguccgggccgaagag

SEQ ID NO: 7820 - RNA, 48 nt, Artificial Sequence
  Description of Artificial Sequence:  Enzymatic Nucleic acid
ucgcugcuggaggaaacucccuucaaggacaucguccgggcccgaaga

SEQ ID NO: 7821 - RNA, 48 nt, Artificial Sequence
  Description of Artificial Sequence:  Enzymatic Nucleic acid
caucgcugggaggaaacucccuucaaggacaucguccggguccccgaa

SEQ ID NO: 7822 - RNA, 48 nt, Artificial Sequence
  Description of Artificial Sequence:  Enzymatic Nucleic acid
ucgcaucgggaggaaacucccuucaaggacaucguccgggugcucccc

SEQ ID NO: 7823 - RNA, 48 nt, Artificial Sequence
  Description of Artificial Sequence:  Enzymatic Nucleic acid
ggucgcauggaggaaacucccuucaaggacaucguccggggcugcucc

SEQ ID NO: 7824 - RNA, 48 nt, Artificial Sequence
  Description of Artificial Sequence:  Enzymatic Nucleic acid
gagggucgggaggaaacucccuucaaggacaucguccgggaucgcugc

SEQ ID NO: 7825 - RNA, 48 nt, Artificial Sequence
  Description of Artificial Sequence:  Enzymatic Nucleic acid
cggaggguggaggaaacucccuucaaggacaucguccggggcaucgcu

SEQ ID NO: 7826 - RNA, 48 nt, Artificial Sequence
  Description of Artificial Sequence:  Enzymatic Nucleic acid
ggccguccggaggaaacucccuucaaggacaucguccgggggaggguc

SEQ ID NO: 7827 - RNA, 48 nt, Artificial Sequence
  Description of Artificial Sequence:  Enzymatic Nucleic acid
cggccgucggaggaaacucccuucaaggacaucguccgggcggagggu

SEQ ID NO: 7828 - RNA, 48 nt, Artificial Sequence
  Description of Artificial Sequence:  Enzymatic Nucleic acid
ccggccguggaggaaacucccuucaaggacaucguccgggccggaggg

SEQ ID NO: 7829 - RNA, 48 nt, Artificial Sequence
  Description of Artificial Sequence:  Enzymatic Nucleic acid
gccccggcggaggaaacucccuucaaggacaucguccggggucccgga

SEQ ID NO: 7830 - RNA, 48 nt, Artificial Sequence
  Description of Artificial Sequence:  Enzymatic Nucleic acid
ugccccggggaggaaacucccuucaaggacaucguccgggcgucccgg

SEQ ID NO: 7831 - RNA, 48 nt, Artificial Sequence
  Description of Artificial Sequence:  Enzymatic Nucleic acid
cgcugcccggaggaaacucccuucaaggacaucguccgggggccgucc

SEQ ID NO: 7832 - RNA, 48 nt, Artificial Sequence
  Description of Artificial Sequence:  Enzymatic Nucleic acid
gcgcugccggaggaaacucccuucaaggacaucguccgggcggccguc

SEQ ID NO: 7833 - RNA, 48 nt, Artificial Sequence
  Description of Artificial Sequence:  Enzymatic Nucleic acid
agcgcugcggaggaaacucccuucaaggacaucguccgggccggccgu

SEQ ID NO: 7834 - RNA, 48 nt, Artificial Sequence
  Description of Artificial Sequence:  Enzymatic Nucleic acid
gagcgcugggaggaaacucccuucaaggacaucguccgggcccggccg

SEQ ID NO: 7835 - RNA, 48 nt, Artificial Sequence
  Description of Artificial Sequence:  Enzymatic Nucleic acid
caggagcgggaggaaacucccuucaaggacaucguccgggugccccgg

SEQ ID NO: 7836 - RNA, 48 nt, Artificial Sequence
  Description of Artificial Sequence:  Enzymatic Nucleic acid
gccaggagggaggaaacucccuucaaggacaucguccggggcugcccc

SEQ ID NO: 7837 - RNA, 48 nt, Artificial Sequence
  Description of Artificial Sequence:  Enzymatic Nucleic acid
agcagcgcggaggaaacucccuucaaggacaucguccgggaggagcgc

SEQ ID NO: 7838 - RNA, 48 nt, Artificial Sequence
  Description of Artificial Sequence:  Enzymatic Nucleic acid
cagcagcgggaggaaacucccuucaaggacaucguccgggcaggagcg

SEQ ID NO: 7839 - RNA, 48 nt, Artificial Sequence
  Description of Artificial Sequence:  Enzymatic Nucleic acid
gccagcagggaggaaacucccuucaaggacaucguccggggccaggag

SEQ ID NO: 7840 - RNA, 48 nt, Artificial Sequence
  Description of Artificial Sequence:  Enzymatic Nucleic acid
gcagccagggaggaaacucccuucaaggacaucguccgggagcgccag

SEQ ID NO: 7841 - RNA, 48 nt, Artificial Sequence
  Description of Artificial Sequence:  Enzymatic Nucleic acid
agcgcagcggaggaaacucccuucaaggacaucguccgggagcagcgc

SEQ ID NO: 7842 - RNA, 48 nt, Artificial Sequence
  Description of Artificial Sequence:  Enzymatic Nucleic acid
gagcgcagggaggaaacucccuucaaggacaucguccgggcagcagcg

SEQ ID NO: 7843 - RNA, 48 nt, Artificial Sequence
  Description of Artificial Sequence:  Enzymatic Nucleic acid
gcagagcgggaggaaacucccuucaaggacaucguccgggagccagca

SEQ ID NO: 7844 - RNA, 48 nt, Artificial Sequence
  Description of Artificial Sequence:  Enzymatic Nucleic acid
gggcagagggaggaaacucccuucaaggacaucguccggggcagccag

SEQ ID NO: 7845 - RNA, 48 nt, Artificial Sequence
  Description of Artificial Sequence:  Enzymatic Nucleic acid
ucgccgggggaggaaacucccuucaaggacaucguccgggagagcgca

SEQ ID NO: 7846 - RNA, 48 nt, Artificial Sequence
  Description of Artificial Sequence:  Enzymatic Nucleic acid
cgacucgcggaggaaacucccuucaaggacaucguccggggggcagag

SEQ ID NO: 7847 - RNA, 48 nt, Artificial Sequence
  Description of Artificial Sequence:  Enzymatic Nucleic acid
ccgacucgggaggaaacucccuucaaggacaucguccgggcgggcaga

SEQ ID NO: 7848 - RNA, 48 nt, Artificial Sequence
  Description of Artificial Sequence:  Enzymatic Nucleic acid
gcccgacuggaggaaacucccuucaaggacaucguccggggccgggca

SEQ ID NO: 7849 - RNA, 48 nt, Artificial Sequence
  Description of Artificial Sequence:  Enzymatic Nucleic acid
gagcccgaggaggaaacucccuucaaggacaucguccgggucgccggg

SEQ ID NO: 7850 - RNA, 48 nt, Artificial Sequence
  Description of Artificial Sequence:  Enzymatic Nucleic acid
ccagagccggaggaaacucccuucaaggacaucguccggggacucgcc

SEQ ID NO: 7851 - RNA, 48 nt, Artificial Sequence
  Description of Artificial Sequence:  Enzymatic Nucleic acid
uccagagcggaggaaacucccuucaaggacaucguccgggcgacucgc

SEQ ID NO: 7852 - RNA, 48 nt, Artificial Sequence
  Description of Artificial Sequence:  Enzymatic Nucleic acid
cuccagagggaggaaacucccuucaaggacaucguccgggccgacucg

SEQ ID NO: 7853 - RNA, 48 nt, Artificial Sequence
  Description of Artificial Sequence:  Enzymatic Nucleic acid
uuuuccucggaggaaacucccuucaaggacaucguccgggagagcccg

SEQ ID NO: 7854 - RNA, 48 nt, Artificial Sequence
  Description of Artificial Sequence:  Enzymatic Nucleic acid
cuuuuccuggaggaaacucccuucaaggacaucguccgggcagagccc

SEQ ID NO: 7855 - RNA, 48 nt, Artificial Sequence
  Description of Artificial Sequence:  Enzymatic Nucleic acid
uucuuuucggaggaaacucccuucaaggacaucguccggguccagagc

SEQ ID NO: 7856 - RNA, 48 nt, Artificial Sequence
  Description of Artificial Sequence:  Enzymatic Nucleic acid
uuucuuuuggaggaaacucccuucaaggacaucguccgggcuccagag

SEQ ID NO: 7857 - RNA, 48 nt, Artificial Sequence
  Description of Artificial Sequence:  Enzymatic Nucleic acid
caaacuuuggaggaaacucccuucaaggacaucguccggguuuuccuc

SEQ ID NO: 7858 - RNA, 48 nt, Artificial Sequence
  Description of Artificial Sequence:  Enzymatic Nucleic acid
uuggcaaaggaggaaacucccuucaaggacaucguccggguuucuuuu

SEQ ID NO: 7859 - RNA, 48 nt, Artificial Sequence
  Description of Artificial Sequence:  Enzymatic Nucleic acid
ugccuuggggaggaaacucccuucaaggacaucguccgggaaacuuuc

SEQ ID NO: 7860 - RNA, 48 nt, Artificial Sequence
  Description of Artificial Sequence:  Enzymatic Nucleic acid
acucgugcggaggaaacucccuucaaggacaucguccggguuggcaaa

SEQ ID NO: 7861 - RNA, 48 nt, Artificial Sequence
  Description of Artificial Sequence:  Enzymatic Nucleic acid
uacucgugggaggaaacucccuucaaggacaucguccgggcuuggcaa

SEQ ID NO: 7862 - RNA, 48 nt, Artificial Sequence
  Description of Artificial Sequence:  Enzymatic Nucleic acid
uuguuacuggaggaaacucccuucaaggacaucguccggggugccuug

SEQ ID NO: 7863 - RNA, 48 nt, Artificial Sequence
  Description of Artificial Sequence:  Enzymatic Nucleic acid
gcuuguuaggaggaaacucccuucaaggacaucguccgggucgugccu

SEQ ID NO: 7864 - RNA, 48 nt, Artificial Sequence
  Description of Artificial Sequence:  Enzymatic Nucleic acid
ugcgugagggaggaaacucccuucaaggacaucguccggguuguuacu

SEQ ID NO: 7865 - RNA, 48 nt, Artificial Sequence
  Description of Artificial Sequence:  Enzymatic Nucleic acid
cccaacugggaggaaacucccuucaaggacaucguccggggugagcuu

SEQ ID NO: 7866 - RNA, 48 nt, Artificial Sequence
  Description of Artificial Sequence:  Enzymatic Nucleic acid
gugcccaaggaggaaacucccuucaaggacaucguccgggugcgugag

SEQ ID NO: 7867 - RNA, 48 nt, Artificial Sequence
  Description of Artificial Sequence:  Enzymatic Nucleic acid
aaagugccggaggaaacucccuucaaggacaucguccgggaacugcgu

SEQ ID NO: 7868 - RNA, 48 nt, Artificial Sequence
  Description of Artificial Sequence:  Enzymatic Nucleic acid
aaaagugcggaggaaacucccuucaaggacaucguccgggcaacugcg

SEQ ID NO: 7869 - RNA, 48 nt, Artificial Sequence
  Description of Artificial Sequence:  Enzymatic Nucleic acid
caaaagugggaggaaacucccuucaaggacaucguccgggccaacugc

SEQ ID NO: 7870 - RNA, 48 nt, Artificial Sequence
  Description of Artificial Sequence:  Enzymatic Nucleic acid
augaucuuggaggaaacucccuucaaggacaucguccgggaaaagugc

SEQ ID NO: 7871 - RNA, 48 nt, Artificial Sequence
  Description of Artificial Sequence:  Enzymatic Nucleic acid
aaaaugauggaggaaacucccuucaaggacaucguccggguucaaaag

SEQ ID NO: 7872 - RNA, 48 nt, Artificial Sequence
  Description of Artificial Sequence:  Enzymatic Nucleic acid
ucuggaggggaggaaacucccuucaaggacaucguccgggugagaaaa

SEQ ID NO: 7873 - RNA, 48 nt, Artificial Sequence
  Description of Artificial Sequence:  Enzymatic Nucleic acid
aacauccuggaggaaacucccuucaaggacaucguccggguggaggcu

SEQ ID NO: 7874 - RNA, 48 nt, Artificial Sequence
  Description of Artificial Sequence:  Enzymatic Nucleic acid
ugaacaucggaggaaacucccuucaaggacaucguccgggucuggagg

SEQ ID NO: 7875 - RNA, 48 nt, Artificial Sequence
  Description of Artificial Sequence:  Enzymatic Nucleic acid
uugaacauggaggaaacucccuucaaggacaucguccgggcucuggag

SEQ ID NO: 7876 - RNA, 48 nt, Artificial Sequence
  Description of Artificial Sequence:  Enzymatic Nucleic acid
uuauugaaggaggaaacucccuucaaggacaucguccgggauccucug

SEQ ID NO: 7877 - RNA, 48 nt, Artificial Sequence
  Description of Artificial Sequence:  Enzymatic Nucleic acid
ccaccucaggaggaaacucccuucaaggacaucguccgggaguuauug

SEQ ID NO: 7878 - RNA, 48 nt, Artificial Sequence
  Description of Artificial Sequence:  Enzymatic Nucleic acid
gaccaccuggaggaaacucccuucaaggacaucguccgggacaguuau

SEQ ID NO: 7879 - RNA, 48 nt, Artificial Sequence
  Description of Artificial Sequence:  Enzymatic Nucleic acid
aggaccacggaggaaacucccuucaaggacaucguccgggucacaguu

SEQ ID NO: 7880 - RNA, 48 nt, Artificial Sequence
  Description of Artificial Sequence:  Enzymatic Nucleic acid
aaggaccaggaggaaacucccuucaaggacaucguccgggcucacagu

SEQ ID NO: 7881 - RNA, 48 nt, Artificial Sequence
  Description of Artificial Sequence:  Enzymatic Nucleic acid
ccaaggacggaggaaacucccuucaaggacaucguccgggaccucaca

SEQ ID NO: 7882 - RNA, 48 nt, Artificial Sequence
  Description of Artificial Sequence:  Enzymatic Nucleic acid
cccaaggaggaggaaacucccuucaaggacaucguccgggcaccucac

SEQ ID NO: 7883 - RNA, 48 nt, Artificial Sequence
  Description of Artificial Sequence:  Enzymatic Nucleic acid
caaauuccggaggaaacucccuucaaggacaucguccgggaaggacca

SEQ ID NO: 7884 - RNA, 48 nt, Artificial Sequence
  Description of Artificial Sequence:  Enzymatic Nucleic acid
ccaaauucggaggaaacucccuucaaggacaucguccgggcaaggacc

SEQ ID NO: 7885 - RNA, 48 nt, Artificial Sequence
  Description of Artificial Sequence:  Enzymatic Nucleic acid
uccaaauuggaggaaacucccuucaaggacaucguccgggccaaggac

SEQ ID NO: 7886 - RNA, 48 nt, Artificial Sequence
  Description of Artificial Sequence:  Enzymatic Nucleic acid
guaauuucggaggaaacucccuucaaggacaucguccgggaaauuccc

SEQ ID NO: 7887 - RNA, 48 nt, Artificial Sequence
  Description of Artificial Sequence:  Enzymatic Nucleic acid
gguaauuuggaggaaacucccuucaaggacaucguccgggcaaauucc

SEQ ID NO: 7888 - RNA, 48 nt, Artificial Sequence
  Description of Artificial Sequence:  Enzymatic Nucleic acid
ccucugcaggaggaaacucccuucaaggacaucguccgggauagguaa

SEQ ID NO: 7889 - RNA, 48 nt, Artificial Sequence
  Description of Artificial Sequence:  Enzymatic Nucleic acid
uuccucugggaggaaacucccuucaaggacaucguccgggacauaggu

SEQ ID NO: 7890 - RNA, 48 nt, Artificial Sequence
  Description of Artificial Sequence:  Enzymatic Nucleic acid
uaauuccuggaggaaacucccuucaaggacaucguccgggugcacaua

SEQ ID NO: 7891 - RNA, 48 nt, Artificial Sequence
  Description of Artificial Sequence:  Enzymatic Nucleic acid
cauaauucggaggaaacucccuucaaggacaucguccgggucugcaca

SEQ ID NO: 7892 - RNA, 48 nt, Artificial Sequence
  Description of Artificial Sequence:  Enzymatic Nucleic acid
ucauaauuggaggaaacucccuucaaggacaucguccgggcucugcac

SEQ ID NO: 7893 - RNA, 48 nt, Artificial Sequence
  Description of Artificial Sequence:  Enzymatic Nucleic acid
ggaaagauggaggaaacucccuucaaggacaucguccgggauaauucc

SEQ ID NO: 7894 - RNA, 48 nt, Artificial Sequence
  Description of Artificial Sequence:  Enzymatic Nucleic acid
uggaugguggaggaaacucccuucaaggacaucguccggguuuaagaa

SEQ ID NO: 7895 - RNA, 48 nt, Artificial Sequence
  Description of Artificial Sequence:  Enzymatic Nucleic acid
gccaccucggaggaaacucccuucaaggacaucguccggguggauggu

SEQ ID NO: 7896 - RNA, 48 nt, Artificial Sequence
  Description of Artificial Sequence:  Enzymatic Nucleic acid
agccaccuggaggaaacucccuucaaggacaucguccgggcuggaugg

SEQ ID NO: 7897 - RNA, 48 nt, Artificial Sequence
  Description of Artificial Sequence:  Enzymatic Nucleic acid
ccagccacggaggaaacucccuucaaggacaucguccggguccuggau

SEQ ID NO: 7898 - RNA, 48 nt, Artificial Sequence
  Description of Artificial Sequence:  Enzymatic Nucleic acid
accagccaggaggaaacucccuucaaggacaucguccgggcuccugga

SEQ ID NO: 7899 - RNA, 48 nt, Artificial Sequence
  Description of Artificial Sequence:  Enzymatic Nucleic acid
uaaccagcggaggaaacucccuucaaggacaucguccgggaccuccug

SEQ ID NO: 7900 - RNA, 48 nt, Artificial Sequence
  Description of Artificial Sequence:  Enzymatic Nucleic acid
auaaccagggaggaaacucccuucaaggacaucguccgggcaccuccu

SEQ ID NO: 7901 - RNA, 48 nt, Artificial Sequence
  Description of Artificial Sequence:  Enzymatic Nucleic acid
gacauaacggaggaaacucccuucaaggacaucguccgggagccaccu

SEQ ID NO: 7902 - RNA, 48 nt, Artificial Sequence
  Description of Artificial Sequence:  Enzymatic Nucleic acid
ggacauaaggaggaaacucccuucaaggacaucguccgggcagccacc

SEQ ID NO: 7903 - RNA, 48 nt, Artificial Sequence
  Description of Artificial Sequence:  Enzymatic Nucleic acid
aaugaggaggaggaaacucccuucaaggacaucguccgggauaaccag

SEQ ID NO: 7904 - RNA, 48 nt, Artificial Sequence
  Description of Artificial Sequence:  Enzymatic Nucleic acid
guugagggggaggaaacucccuucaaggacaucguccgggaaugagga

SEQ ID NO: 7905 - RNA, 48 nt, Artificial Sequence
  Description of Artificial Sequence:  Enzymatic Nucleic acid
ucgcuccaggaggaaacucccuucaaggacaucguccggguguguuga

SEQ ID NO: 7906 - RNA, 48 nt, Artificial Sequence
  Description of Artificial Sequence:  Enzymatic Nucleic acid
auucgcucggaggaaacucccuucaaggacaucguccgggacuguguu

SEQ ID NO: 7907 - RNA, 48 nt, Artificial Sequence
  Description of Artificial Sequence:  Enzymatic Nucleic acid
aauucgcuggaggaaacucccuucaaggacaucguccgggcacugugu

SEQ ID NO: 7908 - RNA, 48 nt, Artificial Sequence
  Description of Artificial Sequence:  Enzymatic Nucleic acid
ggaauucgggaggaaacucccuucaaggacaucguccggguccacugu

SEQ ID NO: 7909 - RNA, 48 nt, Artificial Sequence
  Description of Artificial Sequence:  Enzymatic Nucleic acid
aaggaauuggaggaaacucccuucaaggacaucguccggggcuccacu

SEQ ID NO: 7910 - RNA, 48 nt, Artificial Sequence
  Description of Artificial Sequence:  Enzymatic Nucleic acid
agguuuucggaggaaacucccuucaaggacaucguccgggaaaggaau

SEQ ID NO: 7911 - RNA, 48 nt, Artificial Sequence
  Description of Artificial Sequence:  Enzymatic Nucleic acid
cagguuuuggaggaaacucccuucaaggacaucguccgggcaaaggaa

SEQ ID NO: 7912 - RNA, 48 nt, Artificial Sequence
  Description of Artificial Sequence:  Enzymatic Nucleic acid
augaucugggaggaaacucccuucaaggacaucguccgggagguuuuc

SEQ ID NO: 7913 - RNA, 48 nt, Artificial Sequence
  Description of Artificial Sequence:  Enzymatic Nucleic acid
cugaugauggaggaaacucccuucaaggacaucguccgggugcagguu

SEQ ID NO: 7914 - RNA, 48 nt, Artificial Sequence
  Description of Artificial Sequence:  Enzymatic Nucleic acid
uauuuccuggaggaaacucccuucaaggacaucguccgggugaugauc

SEQ ID NO: 7915 - RNA, 48 nt, Artificial Sequence
  Description of Artificial Sequence:  Enzymatic Nucleic acid
cauauuucggaggaaacucccuucaaggacaucguccgggucugauga

SEQ ID NO: 7916 - RNA, 48 nt, Artificial Sequence
  Description of Artificial Sequence:  Enzymatic Nucleic acid
acauauuuggaggaaacucccuucaaggacaucguccgggcucugaug

SEQ ID NO: 7917 - RNA, 48 nt, Artificial Sequence
  Description of Artificial Sequence:  Enzymatic Nucleic acid
ucguaguaggaggaaacucccuucaaggacaucguccgggauauuucc

SEQ ID NO: 7918 - RNA, 48 nt, Artificial Sequence
  Description of Artificial Sequence:  Enzymatic Nucleic acid
ggaauuuuggaggaaacucccuucaaggacaucguccgggguaguaca

SEQ ID NO: 7919 - RNA, 48 nt, Artificial Sequence
  Description of Artificial Sequence:  Enzymatic Nucleic acid
ugcuaaggggaggaaacucccuucaaggacaucguccgggauaggaau

SEQ ID NO: 7920 - RNA, 48 nt, Artificial Sequence
  Description of Artificial Sequence:  Enzymatic Nucleic acid
uaagacugggaggaaacucccuucaaggacaucguccggguaaggcau

SEQ ID NO: 7921 - RNA, 48 nt, Artificial Sequence
  Description of Artificial Sequence:  Enzymatic Nucleic acid
agauaagaggaggaaacucccuucaaggacaucguccgggugcuaagg

SEQ ID NO: 7922 - RNA, 48 nt, Artificial Sequence
  Description of Artificial Sequence:  Enzymatic Nucleic acid
auuugcauggaggaaacucccuucaaggacaucguccgggauaguuag

SEQ ID NO: 7923 - RNA, 48 nt, Artificial Sequence
  Description of Artificial Sequence:  Enzymatic Nucleic acid
uuuauuugggaggaaacucccuucaaggacaucguccgggaucauagu

SEQ ID NO: 7924 - RNA, 48 nt, Artificial Sequence
  Description of Artificial Sequence:  Enzymatic Nucleic acid
cuucagucggaggaaacucccuucaaggacaucguccggggguuuuau

SEQ ID NO: 7925 - RNA, 48 nt, Artificial Sequence
  Description of Artificial Sequence:  Enzymatic Nucleic acid
ccuucaguggaggaaacucccuucaaggacaucguccgggcgguuuua

SEQ ID NO: 7926 - RNA, 48 nt, Artificial Sequence
  Description of Artificial Sequence:  Enzymatic Nucleic acid
agcuccuuggaggaaacucccuucaaggacaucguccgggaguccggu

SEQ ID NO: 7927 - RNA, 48 nt, Artificial Sequence
  Description of Artificial Sequence:  Enzymatic Nucleic acid
ggcagcucggaggaaacucccuucaaggacaucguccggguucagucc

SEQ ID NO: 7928 - RNA, 48 nt, Artificial Sequence
  Description of Artificial Sequence:  Enzymatic Nucleic acid
gggcagcuggaggaaacucccuucaaggacaucguccgggcuucaguc

SEQ ID NO: 7929 - RNA, 48 nt, Artificial Sequence
  Description of Artificial Sequence:  Enzymatic Nucleic acid
augggcagggaggaaacucccuucaaggacaucguccggguccuucag

SEQ ID NO: 7930 - RNA, 48 nt, Artificial Sequence
  Description of Artificial Sequence:  Enzymatic Nucleic acid
cucaugggggaggaaacucccuucaaggacaucguccgggagcuccuu

SEQ ID NO: 7931 - RNA, 48 nt, Artificial Sequence
  Description of Artificial Sequence:  Enzymatic Nucleic acid
aaauuucuggaggaaacucccuucaaggacaucguccgggaugggcag

SEQ ID NO: 7932 - RNA, 48 nt, Artificial Sequence
  Description of Artificial Sequence:  Enzymatic Nucleic acid
guaaauuuggaggaaacucccuucaaggacaucguccgggucaugggc

SEQ ID NO: 7933 - RNA, 48 nt, Artificial Sequence
  Description of Artificial Sequence:  Enzymatic Nucleic acid
aggauuucggaggaaacucccuucaaggacaucguccggguguaaauu

SEQ ID NO: 7934 - RNA, 48 nt, Artificial Sequence
  Description of Artificial Sequence:  Enzymatic Nucleic acid
caggauuuggaggaaacucccuucaaggacaucguccgggcuguaaau

SEQ ID NO: 7935 - RNA, 48 nt, Artificial Sequence
  Description of Artificial Sequence:  Enzymatic Nucleic acid
gcgccaugggaggaaacucccuucaaggacaucguccgggaggauuuc

SEQ ID NO: 7936 - RNA, 48 nt, Artificial Sequence
  Description of Artificial Sequence:  Enzymatic Nucleic acid
cacggcgcggaggaaacucccuucaaggacaucguccgggaugcagga

SEQ ID NO: 7937 - RNA, 48 nt, Artificial Sequence
  Description of Artificial Sequence:  Enzymatic Nucleic acid
gcacggcgggaggaaacucccuucaaggacaucguccgggcaugcagg

SEQ ID NO: 7938 - RNA, 48 nt, Artificial Sequence
  Description of Artificial Sequence:  Enzymatic Nucleic acid
ccgcacggggaggaaacucccuucaaggacaucguccggggccaugca

SEQ ID NO: 7939 - RNA, 48 nt, Artificial Sequence
  Description of Artificial Sequence:  Enzymatic Nucleic acid
gaaccgcaggaggaaacucccuucaaggacaucguccgggggcgccau

SEQ ID NO: 7940 - RNA, 48 nt, Artificial Sequence
  Description of Artificial Sequence:  Enzymatic Nucleic acid
cugaaccgggaggaaacucccuucaaggacaucguccgggacggcgcc

SEQ ID NO: 7941 - RNA, 48 nt, Artificial Sequence
  Description of Artificial Sequence:  Enzymatic Nucleic acid
ugcugaacggaggaaacucccuucaaggacaucguccggggcacggcg

SEQ ID NO: 7942 - RNA, 48 nt, Artificial Sequence
  Description of Artificial Sequence:  Enzymatic Nucleic acid
uugcugaaggaggaaacucccuucaaggacaucguccgggcgcacggc

SEQ ID NO: 7943 - RNA, 48 nt, Artificial Sequence
  Description of Artificial Sequence:  Enzymatic Nucleic acid
gguuguugggaggaaacucccuucaaggacaucguccgggugaaccgc

SEQ ID NO: 7944 - RNA, 48 nt, Artificial Sequence
  Description of Artificial Sequence:  Enzymatic Nucleic acid
gcacagggggaggaaacucccuucaaggacaucguccgggaggguugu

SEQ ID NO: 7945 - RNA, 48 nt, Artificial Sequence
  Description of Artificial Sequence:  Enzymatic Nucleic acid
acguugcaggaggaaacucccuucaaggacaucguccgggagggcagg

SEQ ID NO: 7946 - RNA, 48 nt, Artificial Sequence
  Description of Artificial Sequence:  Enzymatic Nucleic acid
ccacguugggaggaaacucccuucaaggacaucguccgggacagggca

SEQ ID NO: 7947 - RNA, 48 nt, Artificial Sequence
  Description of Artificial Sequence:  Enzymatic Nucleic acid
gcucuccaggaggaaacucccuucaaggacaucguccgggguugcaca

SEQ ID NO: 7948 - RNA, 48 nt, Artificial Sequence
  Description of Artificial Sequence:  Enzymatic Nucleic acid
augcucucggaggaaacucccuucaaggacaucguccgggacguugca

SEQ ID NO: 7949 - RNA, 48 nt, Artificial Sequence
  Description of Artificial Sequence:  Enzymatic Nucleic acid
gaugcucuggaggaaacucccuucaaggacaucguccgggcacguugc

SEQ ID NO: 7950 - RNA, 48 nt, Artificial Sequence
  Description of Artificial Sequence:  Enzymatic Nucleic acid
uggaugcuggaggaaacucccuucaaggacaucguccggguccacguu

SEQ ID NO: 7951 - RNA, 48 nt, Artificial Sequence
  Description of Artificial Sequence:  Enzymatic Nucleic acid
acuggaugggaggaaacucccuucaaggacaucguccgggucuccacg

SEQ ID NO: 7952 - RNA, 48 nt, Artificial Sequence
  Description of Artificial Sequence:  Enzymatic Nucleic acid
ucccgccaggaggaaacucccuucaaggacaucguccggguggaugcu

SEQ ID NO: 7953 - RNA, 48 nt, Artificial Sequence
  Description of Artificial Sequence:  Enzymatic Nucleic acid
ugucccgcggaggaaacucccuucaaggacaucguccgggacuggaug

SEQ ID NO: 7954 - RNA, 48 nt, Artificial Sequence
  Description of Artificial Sequence:  Enzymatic Nucleic acid
augucccgggaggaaacucccuucaaggacaucguccgggcacuggau

SEQ ID NO: 7955 - RNA, 48 nt, Artificial Sequence
  Description of Artificial Sequence:  Enzymatic Nucleic acid
cuauguccggaggaaacucccuucaaggacaucguccggggccacugg

SEQ ID NO: 7956 - RNA, 48 nt, Artificial Sequence
  Description of Artificial Sequence:  Enzymatic Nucleic acid
acuaugucggaggaaacucccuucaaggacaucguccgggcgccacug

SEQ ID NO: 7957 - RNA, 48 nt, Artificial Sequence
  Description of Artificial Sequence:  Enzymatic Nucleic acid
gacuauguggaggaaacucccuucaaggacaucguccgggccgccacu

SEQ ID NO: 7958 - RNA, 48 nt, Artificial Sequence
  Description of Artificial Sequence:  Enzymatic Nucleic acid
acugcugaggaggaaacucccuucaaggacaucguccggguauguccc

SEQ ID NO: 7959 - RNA, 48 nt, Artificial Sequence
  Description of Artificial Sequence:  Enzymatic Nucleic acid
agucacugggaggaaacucccuucaaggacaucguccgggugacuaug

SEQ ID NO: 7960 - RNA, 48 nt, Artificial Sequence
  Description of Artificial Sequence:  Enzymatic Nucleic acid
gaaagucaggaggaaacucccuucaaggacaucguccgggugcugacu

SEQ ID NO: 7961 - RNA, 48 nt, Artificial Sequence
  Description of Artificial Sequence:  Enzymatic Nucleic acid
gagaaaguggaggaaacucccuucaaggacaucguccgggacugcuga

SEQ ID NO: 7962 - RNA, 48 nt, Artificial Sequence
  Description of Artificial Sequence:  Enzymatic Nucleic acid
acauguugggaggaaacucccuucaaggacaucguccgggugagaaag

SEQ ID NO: 7963 - RNA, 48 nt, Artificial Sequence
  Description of Artificial Sequence:  Enzymatic Nucleic acid
uccaucgaggaggaaacucccuucaaggacaucguccgggauguugcu

SEQ ID NO: 7964 - RNA, 48 nt, Artificial Sequence
  Description of Artificial Sequence:  Enzymatic Nucleic acid
aaguccauggaggaaacucccuucaaggacaucguccggggacauguu

SEQ ID NO: 7965 - RNA, 48 nt, Artificial Sequence
  Description of Artificial Sequence:  Enzymatic Nucleic acid
uggaagucggaggaaacucccuucaaggacaucguccgggaucgacau

SEQ ID NO: 7966 - RNA, 48 nt, Artificial Sequence
  Description of Artificial Sequence:  Enzymatic Nucleic acid
cuggaaguggaggaaacucccuucaaggacaucguccgggcaucgaca

SEQ ID NO: 7967 - RNA, 48 nt, Artificial Sequence
  Description of Artificial Sequence:  Enzymatic Nucleic acid
aggugguuggaggaaacucccuucaaggacaucguccggguggaaguc

SEQ ID NO: 7968 - RNA, 48 nt, Artificial Sequence
  Description of Artificial Sequence:  Enzymatic Nucleic acid
cagcugccggaggaaacucccuucaaggacaucguccgggaggugguu

SEQ ID NO: 7969 - RNA, 48 nt, Artificial Sequence
  Description of Artificial Sequence:  Enzymatic Nucleic acid
gcagcugcggaggaaacucccuucaaggacaucguccgggcagguggu

SEQ ID NO: 7970 - RNA, 48 nt, Artificial Sequence
  Description of Artificial Sequence:  Enzymatic Nucleic acid
ggcagcugggaggaaacucccuucaaggacaucguccgggccaggugg

SEQ ID NO: 7971 - RNA, 48 nt, Artificial Sequence
  Description of Artificial Sequence:  Enzymatic Nucleic acid
uuuggcagggaggaaacucccuucaaggacaucguccgggugcccagg

SEQ ID NO: 7972 - RNA, 48 nt, Artificial Sequence
  Description of Artificial Sequence:  Enzymatic Nucleic acid
acuuuuggggaggaaacucccuucaaggacaucguccgggagcugccc

SEQ ID NO: 7973 - RNA, 48 nt, Artificial Sequence
  Description of Artificial Sequence:  Enzymatic Nucleic acid
ggaucacaggaggaaacucccuucaaggacaucguccggguuuuggca

SEQ ID NO: 7974 - RNA, 48 nt, Artificial Sequence
  Description of Artificial Sequence:  Enzymatic Nucleic acid
uuggaucaggaggaaacucccuucaaggacaucguccgggacuuuugg

SEQ ID NO: 7975 - RNA, 48 nt, Artificial Sequence
  Description of Artificial Sequence:  Enzymatic Nucleic acid
gcuuggauggaggaaacucccuucaaggacaucguccgggacacuuuu

SEQ ID NO: 7976 - RNA, 48 nt, Artificial Sequence
  Description of Artificial Sequence:  Enzymatic Nucleic acid
ugggacagggaggaaacucccuucaaggacaucguccggguuggauca

SEQ ID NO: 7977 - RNA, 48 nt, Artificial Sequence
  Description of Artificial Sequence:  Enzymatic Nucleic acid
cauugggaggaggaaacucccuucaaggacaucguccgggagcuugga

SEQ ID NO: 7978 - RNA, 48 nt, Artificial Sequence
  Description of Artificial Sequence:  Enzymatic Nucleic acid
gcagcuccggaggaaacucccuucaaggacaucguccgggauugggac

SEQ ID NO: 7979 - RNA, 48 nt, Artificial Sequence
  Description of Artificial Sequence:  Enzymatic Nucleic acid
agcagcucggaggaaacucccuucaaggacaucguccgggcauuggga

SEQ ID NO: 7980 - RNA, 48 nt, Artificial Sequence
  Description of Artificial Sequence:  Enzymatic Nucleic acid
cagcagcuggaggaaacucccuucaaggacaucguccgggccauuggg

SEQ ID NO: 7981 - RNA, 48 nt, Artificial Sequence
  Description of Artificial Sequence:  Enzymatic Nucleic acid
cccagcagggaggaaacucccuucaaggacaucguccgggucccauug

SEQ ID NO: 7982 - RNA, 48 nt, Artificial Sequence
  Description of Artificial Sequence:  Enzymatic Nucleic acid
caccccagggaggaaacucccuucaaggacaucguccgggagcuccca

SEQ ID NO: 7983 - RNA, 48 nt, Artificial Sequence
  Description of Artificial Sequence:  Enzymatic Nucleic acid
cugcacccggaggaaacucccuucaaggacaucguccgggagcagcuc

SEQ ID NO: 7984 - RNA, 48 nt, Artificial Sequence
  Description of Artificial Sequence:  Enzymatic Nucleic acid
ccugcaccggaggaaacucccuucaaggacaucguccgggcagcagcu

SEQ ID NO: 7985 - RNA, 48 nt, Artificial Sequence
  Description of Artificial Sequence:  Enzymatic Nucleic acid
uccugcacggaggaaacucccuucaaggacaucguccgggccagcagc

SEQ ID NO: 7986 - RNA, 48 nt, Artificial Sequence
  Description of Artificial Sequence:  Enzymatic Nucleic acid
cuccugcaggaggaaacucccuucaaggacaucguccgggcccagcag

SEQ ID NO: 7987 - RNA, 48 nt, Artificial Sequence
  Description of Artificial Sequence:  Enzymatic Nucleic acid
cucuccugggaggaaacucccuucaaggacaucguccgggaccccagc

SEQ ID NO: 7988 - RNA, 48 nt, Artificial Sequence
  Description of Artificial Sequence:  Enzymatic Nucleic acid
cuccucucggaggaaacucccuucaaggacaucguccgggugcacccc

SEQ ID NO: 7989 - RNA, 48 nt, Artificial Sequence
  Description of Artificial Sequence:  Enzymatic Nucleic acid
ucuccucuggaggaaacucccuucaaggacaucguccgggcugcaccc

SEQ ID NO: 7990 - RNA, 48 nt, Artificial Sequence
  Description of Artificial Sequence:  Enzymatic Nucleic acid
guucuccuggaggaaacucccuucaaggacaucguccggguccugcac

SEQ ID NO: 7991 - RNA, 48 nt, Artificial Sequence
  Description of Artificial Sequence:  Enzymatic Nucleic acid
caguucucggaggaaacucccuucaaggacaucguccgggucuccugc

SEQ ID NO: 7992 - RNA, 48 nt, Artificial Sequence
  Description of Artificial Sequence:  Enzymatic Nucleic acid
gcaguucuggaggaaacucccuucaaggacaucguccgggcucuccug

SEQ ID NO: 7993 - RNA, 48 nt, Artificial Sequence
  Description of Artificial Sequence:  Enzymatic Nucleic acid
uggcaguuggaggaaacucccuucaaggacaucguccggguccucucc

SEQ ID NO: 7994 - RNA, 48 nt, Artificial Sequence
  Description of Artificial Sequence:  Enzymatic Nucleic acid
guuucuggggaggaaacucccuucaaggacaucguccgggaguucucc

SEQ ID NO: 7995 - RNA, 48 nt, Artificial Sequence
  Description of Artificial Sequence:  Enzymatic Nucleic acid
gucaguuuggaggaaacucccuucaaggacaucguccggguggcaguu

SEQ ID NO: 7996 - RNA, 48 nt, Artificial Sequence
  Description of Artificial Sequence:  Enzymatic Nucleic acid
auuuugguggaggaaacucccuucaaggacaucguccgggaguuucug

SEQ ID NO: 7997 - RNA, 48 nt, Artificial Sequence
  Description of Artificial Sequence:  Enzymatic Nucleic acid
gcugggcaggaggaaacucccuucaaggacaucguccgggagaugauu

SEQ ID NO: 7998 - RNA, 48 nt, Artificial Sequence
  Description of Artificial Sequence:  Enzymatic Nucleic acid
cugcugggggaggaaacucccuucaaggacaucguccgggacagauga

SEQ ID NO: 7999 - RNA, 48 nt, Artificial Sequence
  Description of Artificial Sequence:  Enzymatic Nucleic acid
gagcacugggaggaaacucccuucaaggacaucguccgggugggcaca

SEQ ID NO: 8000 - RNA, 48 nt, Artificial Sequence
  Description of Artificial Sequence:  Enzymatic Nucleic acid
ccggagcaggaggaaacucccuucaaggacaucguccgggugcugggc

SEQ ID NO: 8001 - RNA, 48 nt, Artificial Sequence
  Description of Artificial Sequence:  Enzymatic Nucleic acid
gcccggagggaggaaacucccuucaaggacaucguccgggacugcugg

SEQ ID NO: 8002 - RNA, 48 nt, Artificial Sequence
  Description of Artificial Sequence:  Enzymatic Nucleic acid
gcagcgccggaggaaacucccuucaaggacaucguccgggggagcacu

SEQ ID NO: 8003 - RNA, 48 nt, Artificial Sequence
  Description of Artificial Sequence:  Enzymatic Nucleic acid
ggcagcgcggaggaaacucccuucaaggacaucguccgggcggagcac

SEQ ID NO: 8004 - RNA, 48 nt, Artificial Sequence
  Description of Artificial Sequence:  Enzymatic Nucleic acid
cggcagcgggaggaaacucccuucaaggacaucguccgggccggagca

SEQ ID NO: 8005 - RNA, 48 nt, Artificial Sequence
  Description of Artificial Sequence:  Enzymatic Nucleic acid
cacggcagggaggaaacucccuucaaggacaucguccggggcccggag

SEQ ID NO: 8006 - RNA, 48 nt, Artificial Sequence
  Description of Artificial Sequence:  Enzymatic Nucleic acid
ugccacggggaggaaacucccuucaaggacaucguccgggagcgcccg

SEQ ID NO: 8007 - RNA, 48 nt, Artificial Sequence
  Description of Artificial Sequence:  Enzymatic Nucleic acid
acuugccaggaggaaacucccuucaaggacaucguccgggggcagcgc

SEQ ID NO: 8008 - RNA, 48 nt, Artificial Sequence
  Description of Artificial Sequence:  Enzymatic Nucleic acid
ggacuugcggaggaaacucccuucaaggacaucguccgggacggcagc

SEQ ID NO: 8009 - RNA, 48 nt, Artificial Sequence
  Description of Artificial Sequence:  Enzymatic Nucleic acid
gggacuugggaggaaacucccuucaaggacaucguccgggcacggcag

SEQ ID NO: 8010 - RNA, 48 nt, Artificial Sequence
  Description of Artificial Sequence:  Enzymatic Nucleic acid
cugggggaggaggaaacucccuucaaggacaucguccggguugccacg

SEQ ID NO: 8011 - RNA, 48 nt, Artificial Sequence
  Description of Artificial Sequence:  Enzymatic Nucleic acid
agcagucaggaggaaacucccuucaaggacaucguccgggugggggac

SEQ ID NO: 8012 - RNA, 48 nt, Artificial Sequence
  Description of Artificial Sequence:  Enzymatic Nucleic acid
gcagcaguggaggaaacucccuucaaggacaucguccgggacuggggg

SEQ ID NO: 8013 - RNA, 48 nt, Artificial Sequence
  Description of Artificial Sequence:  Enzymatic Nucleic acid
uguggcagggaggaaacucccuucaaggacaucguccgggagucacug

SEQ ID NO: 8014 - RNA, 48 nt, Artificial Sequence
  Description of Artificial Sequence:  Enzymatic Nucleic acid
gguuguggggaggaaacucccuucaaggacaucguccgggagcaguca

SEQ ID NO: 8015 - RNA, 48 nt, Artificial Sequence
  Description of Artificial Sequence:  Enzymatic Nucleic acid
gcagcacaggaggaaacucccuucaaggacaucguccgggugguugug

SEQ ID NO: 8016 - RNA, 48 nt, Artificial Sequence
  Description of Artificial Sequence:  Enzymatic Nucleic acid
cugcagcaggaggaaacucccuucaaggacaucguccgggacugguug

SEQ ID NO: 8017 - RNA, 48 nt, Artificial Sequence
  Description of Artificial Sequence:  Enzymatic Nucleic acid
gccugcagggaggaaacucccuucaaggacaucguccgggacacuggu

SEQ ID NO: 8018 - RNA, 48 nt, Artificial Sequence
  Description of Artificial Sequence:  Enzymatic Nucleic acid
gcagccugggaggaaacucccuucaaggacaucguccgggagcacacu

SEQ ID NO: 8019 - RNA, 48 nt, Artificial Sequence
  Description of Artificial Sequence:  Enzymatic Nucleic acid
ugugcagcggaggaaacucccuucaaggacaucguccgggugcagcac

SEQ ID NO: 8020 - RNA, 48 nt, Artificial Sequence
  Description of Artificial Sequence:  Enzymatic Nucleic acid
cugugcagggaggaaacucccuucaaggacaucguccgggcugcagca

SEQ ID NO: 8021 - RNA, 48 nt, Artificial Sequence
  Description of Artificial Sequence:  Enzymatic Nucleic acid
ggccugugggaggaaacucccuucaaggacaucguccgggagccugca

SEQ ID NO: 8022 - RNA, 48 nt, Artificial Sequence
  Description of Artificial Sequence:  Enzymatic Nucleic acid
ccgggggcggaggaaacucccuucaaggacaucguccgggugugcagc

SEQ ID NO: 8023 - RNA, 48 nt, Artificial Sequence
  Description of Artificial Sequence:  Enzymatic Nucleic acid
cccgggggggaggaaacucccuucaaggacaucguccgggcugugcag

SEQ ID NO: 8024 - RNA, 48 nt, Artificial Sequence
  Description of Artificial Sequence:  Enzymatic Nucleic acid
cgcucuccggaggaaacucccuucaaggacaucguccggggggggccu

SEQ ID NO: 8025 - RNA, 48 nt, Artificial Sequence
  Description of Artificial Sequence:  Enzymatic Nucleic acid
ucgcucucggaggaaacucccuucaaggacaucguccgggcgggggcc

SEQ ID NO: 8026 - RNA, 48 nt, Artificial Sequence
  Description of Artificial Sequence:  Enzymatic Nucleic acid
gucgcucuggaggaaacucccuucaaggacaucguccgggccgggggc

SEQ ID NO: 8027 - RNA, 48 nt, Artificial Sequence
  Description of Artificial Sequence:  Enzymatic Nucleic acid
cagucgcuggaggaaacucccuucaaggacaucguccgggucccgggg

SEQ ID NO: 8028 - RNA, 48 nt, Artificial Sequence
  Description of Artificial Sequence:  Enzymatic Nucleic acid
ggcagucgggaggaaacucccuucaaggacaucguccgggucucccgg

SEQ ID NO: 8029 - RNA, 48 nt, Artificial Sequence
  Description of Artificial Sequence:  Enzymatic Nucleic acid
caggcaguggaggaaacucccuucaaggacaucguccggggcucuccc

SEQ ID NO: 8030 - RNA, 48 nt, Artificial Sequence
  Description of Artificial Sequence:  Enzymatic Nucleic acid
agaccaggggaggaaacucccuucaaggacaucguccgggagucgcuc

SEQ ID NO: 8031 - RNA, 48 nt, Artificial Sequence
  Description of Artificial Sequence:  Enzymatic Nucleic acid
cggcagacggaggaaacucccuucaaggacaucguccgggaggcaguc

SEQ ID NO: 8032 - RNA, 48 nt, Artificial Sequence
  Description of Artificial Sequence:  Enzymatic Nucleic acid
gcggcagaggaggaaacucccuucaaggacaucguccgggcaggcagu

SEQ ID NO: 8033 - RNA, 48 nt, Artificial Sequence
  Description of Artificial Sequence:  Enzymatic Nucleic acid
auuugcggggaggaaacucccuucaaggacaucguccgggagaccagg

SEQ ID NO: 8034 - RNA, 48 nt, Artificial Sequence
  Description of Artificial Sequence:  Enzymatic Nucleic acid
ggaauuugggaggaaacucccuucaaggacaucguccgggggcagacc

SEQ ID NO: 8035 - RNA, 48 nt, Artificial Sequence
  Description of Artificial Sequence:  Enzymatic Nucleic acid
cuucgucuggaggaaacucccuucaaggacaucguccgggggaauuug

SEQ ID NO: 8036 - RNA, 48 nt, Artificial Sequence
  Description of Artificial Sequence:  Enzymatic Nucleic acid
ggcuucguggaggaaacucccuucaaggacaucguccgggucggaauu

SEQ ID NO: 8037 - RNA, 48 nt, Artificial Sequence
  Description of Artificial Sequence:  Enzymatic Nucleic acid
cguggcuuggaggaaacucccuucaaggacaucguccggggucucgga

SEQ ID NO: 8038 - RNA, 48 nt, Artificial Sequence
  Description of Artificial Sequence:  Enzymatic Nucleic acid
gcacguggggaggaaacucccuucaaggacaucguccggguucgucuc

SEQ ID NO: 8039 - RNA, 48 nt, Artificial Sequence
  Description of Artificial Sequence:  Enzymatic Nucleic acid
uccuugcaggaggaaacucccuucaaggacaucguccgggguggcuuc

SEQ ID NO: 8040 - RNA, 48 nt, Artificial Sequence
  Description of Artificial Sequence:  Enzymatic Nucleic acid
uguccuugggaggaaacucccuucaaggacaucguccgggacguggcu

SEQ ID NO: 8041 - RNA, 48 nt, Artificial Sequence
  Description of Artificial Sequence:  Enzymatic Nucleic acid
caggugucggaggaaacucccuucaaggacaucguccggguugcacgu

SEQ ID NO: 8042 - RNA, 48 nt, Artificial Sequence
  Description of Artificial Sequence:  Enzymatic Nucleic acid
gcagguguggaggaaacucccuucaaggacaucguccgggcuugcacg

SEQ ID NO: 8043 - RNA, 48 nt, Artificial Sequence
  Description of Artificial Sequence:  Enzymatic Nucleic acid
guggggggggaggaaacucccuucaaggacaucguccgggaggugucc

SEQ ID NO: 8044 - RNA, 48 nt, Artificial Sequence
  Description of Artificial Sequence:  Enzymatic Nucleic acid
uuguagagggaggaaacucccuucaaggacaucguccgggaugagugg

SEQ ID NO: 8045 - RNA, 48 nt, Artificial Sequence
  Description of Artificial Sequence:  Enzymatic Nucleic acid
aucugguaggaggaaacucccuucaaggacaucguccggggugguggg

SEQ ID NO: 8046 - RNA, 48 nt, Artificial Sequence
  Description of Artificial Sequence:  Enzymatic Nucleic acid
acauccauggaggaaacucccuucaaggacaucguccgggugguacgu

SEQ ID NO: 8047 - RNA, 48 nt, Artificial Sequence
  Description of Artificial Sequence:  Enzymatic Nucleic acid
uucacaucggaggaaacucccuucaaggacaucguccgggaucuggua

SEQ ID NO: 8048 - RNA, 48 nt, Artificial Sequence
  Description of Artificial Sequence:  Enzymatic Nucleic acid
guucacauggaggaaacucccuucaaggacaucguccgggcaucuggu

SEQ ID NO: 8049 - RNA, 48 nt, Artificial Sequence
  Description of Artificial Sequence:  Enzymatic Nucleic acid
gggguucaggaggaaacucccuucaaggacaucguccgggauccaucu

SEQ ID NO: 8050 - RNA, 48 nt, Artificial Sequence
  Description of Artificial Sequence:  Enzymatic Nucleic acid
ucgggguuggaggaaacucccuucaaggacaucguccgggacauccau

SEQ ID NO: 8051 - RNA, 48 nt, Artificial Sequence
  Description of Artificial Sequence:  Enzymatic Nucleic acid
uuugcccuggaggaaacucccuucaaggacaucguccggggggguuca

SEQ ID NO: 8052 - RNA, 48 nt, Artificial Sequence
  Description of Artificial Sequence:  Enzymatic Nucleic acid
uauuugccggaggaaacucccuucaaggacaucguccgggucgggguu

SEQ ID NO: 8053 - RNA, 48 nt, Artificial Sequence
  Description of Artificial Sequence:  Enzymatic Nucleic acid
guauuugcggaggaaacucccuucaaggacaucguccgggcucggggu

SEQ ID NO: 8054 - RNA, 48 nt, Artificial Sequence
  Description of Artificial Sequence:  Enzymatic Nucleic acid
uguauuugggaggaaacucccuucaaggacaucguccgggccucgggg

SEQ ID NO: 8055 - RNA, 48 nt, Artificial Sequence
  Description of Artificial Sequence:  Enzymatic Nucleic acid
caccaaagggaggaaacucccuucaaggacaucguccggguguauuug

SEQ ID NO: 8056 - RNA, 48 nt, Artificial Sequence
  Description of Artificial Sequence:  Enzymatic Nucleic acid
gguggcacggaggaaacucccuucaaggacaucguccgggaaagcugu

SEQ ID NO: 8057 - RNA, 48 nt, Artificial Sequence
  Description of Artificial Sequence:  Enzymatic Nucleic acid
agguggcaggaggaaacucccuucaaggacaucguccgggcaaagcug

SEQ ID NO: 8058 - RNA, 48 nt, Artificial Sequence
  Description of Artificial Sequence:  Enzymatic Nucleic acid
gcagguggggaggaaacucccuucaaggacaucguccgggaccaaagc

SEQ ID NO: 8059 - RNA, 48 nt, Artificial Sequence
  Description of Artificial Sequence:  Enzymatic Nucleic acid
ucuucacgggaggaaacucccuucaaggacaucguccgggagguggca

SEQ ID NO: 8060 - RNA, 48 nt, Artificial Sequence
  Description of Artificial Sequence:  Enzymatic Nucleic acid
cuucuucaggaggaaacucccuucaaggacaucguccggggcaggugg

SEQ ID NO: 8061 - RNA, 48 nt, Artificial Sequence
  Description of Artificial Sequence:  Enzymatic Nucleic acid
cacuucuuggaggaaacucccuucaaggacaucguccgggacgcaggu

SEQ ID NO: 8062 - RNA, 48 nt, Artificial Sequence
  Description of Artificial Sequence:  Enzymatic Nucleic acid
ggacacuuggaggaaacucccuucaaggacaucguccggguucacgca

SEQ ID NO: 8063 - RNA, 48 nt, Artificial Sequence
  Description of Artificial Sequence:  Enzymatic Nucleic acid
cggggacaggaggaaacucccuucaaggacaucguccggguucuucac

SEQ ID NO: 8064 - RNA, 48 nt, Artificial Sequence
  Description of Artificial Sequence:  Enzymatic Nucleic acid
uacggggaggaggaaacucccuucaaggacaucguccgggacuucuuc

SEQ ID NO: 8065 - RNA, 48 nt, Artificial Sequence
  Description of Artificial Sequence:  Enzymatic Nucleic acid
cauaauuaggaggaaacucccuucaaggacaucguccgggggggacac

SEQ ID NO: 8066 - RNA, 48 nt, Artificial Sequence
  Description of Artificial Sequence:  Enzymatic Nucleic acid
ugucaccaggaggaaacucccuucaaggacaucguccgggauaauuac

SEQ ID NO: 8067 - RNA, 48 nt, Artificial Sequence
  Description of Artificial Sequence:  Enzymatic Nucleic acid
ucugucacggaggaaacucccuucaaggacaucguccgggacauaauu

SEQ ID NO: 8068 - RNA, 48 nt, Artificial Sequence
  Description of Artificial Sequence:  Enzymatic Nucleic acid
aucugucaggaggaaacucccuucaaggacaucguccgggcacauaau

SEQ ID NO: 8069 - RNA, 48 nt, Artificial Sequence
  Description of Artificial Sequence:  Enzymatic Nucleic acid
ugaucuguggaggaaacucccuucaaggacaucguccgggaccacaua

SEQ ID NO: 8070 - RNA, 48 nt, Artificial Sequence
  Description of Artificial Sequence:  Enzymatic Nucleic acid
gccgugauggaggaaacucccuucaaggacaucguccgggugucacca

SEQ ID NO: 8071 - RNA, 48 nt, Artificial Sequence
  Description of Artificial Sequence:  Enzymatic Nucleic acid
gcacgagcggaggaaacucccuucaaggacaucguccggggugaucug

SEQ ID NO: 8072 - RNA, 48 nt, Artificial Sequence
  Description of Artificial Sequence:  Enzymatic Nucleic acid
cgcacgagggaggaaacucccuucaaggacaucguccgggcgugaucu

SEQ ID NO: 8073 - RNA, 48 nt, Artificial Sequence
  Description of Artificial Sequence:  Enzymatic Nucleic acid
cggacgcaggaggaaacucccuucaaggacaucguccggggagccgug

SEQ ID NO: 8074 - RNA, 48 nt, Artificial Sequence
  Description of Artificial Sequence:  Enzymatic Nucleic acid
cucggacgggaggaaacucccuucaaggacaucguccgggacgagccg

SEQ ID NO: 8075 - RNA, 48 nt, Artificial Sequence
  Description of Artificial Sequence:  Enzymatic Nucleic acid
ggcucggaggaggaaacucccuucaaggacaucguccggggcacgagc

SEQ ID NO: 8076 - RNA, 48 nt, Artificial Sequence
  Description of Artificial Sequence:  Enzymatic Nucleic acid
cacaggcuggaggaaacucccuucaaggacaucguccgggggacgcac

SEQ ID NO: 8077 - RNA, 48 nt, Artificial Sequence
  Description of Artificial Sequence:  Enzymatic Nucleic acid
cccacaggggaggaaacucccuucaaggacaucguccgggucggacgc

SEQ ID NO: 8078 - RNA, 48 nt, Artificial Sequence
  Description of Artificial Sequence:  Enzymatic Nucleic acid
cggccccaggaggaaacucccuucaaggacaucguccgggaggcucgg

SEQ ID NO: 8079 - RNA, 48 nt, Artificial Sequence
  Description of Artificial Sequence:  Enzymatic Nucleic acid
gucggcccggaggaaacucccuucaaggacaucguccgggacaggcuc

SEQ ID NO: 8080 - RNA, 48 nt, Artificial Sequence
  Description of Artificial Sequence:  Enzymatic Nucleic acid
ugucggccggaggaaacucccuucaaggacaucguccgggcacaggcu

SEQ ID NO: 8081 - RNA, 48 nt, Artificial Sequence
  Description of Artificial Sequence:  Enzymatic Nucleic acid
cugucggcggaggaaacucccuucaaggacaucguccgggccacaggc

SEQ ID NO: 8082 - RNA, 48 nt, Artificial Sequence
  Description of Artificial Sequence:  Enzymatic Nucleic acid
gcugucggggaggaaacucccuucaaggacaucguccgggcccacagg

SEQ ID NO: 8083 - RNA, 48 nt, Artificial Sequence
  Description of Artificial Sequence:  Enzymatic Nucleic acid
auagcuguggaggaaacucccuucaaggacaucguccgggggccccac

SEQ ID NO: 8084 - RNA, 48 nt, Artificial Sequence
  Description of Artificial Sequence:  Enzymatic Nucleic acid
ucucauagggaggaaacucccuucaaggacaucguccgggugucggcc

SEQ ID NO: 8085 - RNA, 48 nt, Artificial Sequence
  Description of Artificial Sequence:  Enzymatic Nucleic acid
cuccaucuggaggaaacucccuucaaggacaucguccgggauagcugu

SEQ ID NO: 8086 - RNA, 48 nt, Artificial Sequence
  Description of Artificial Sequence:  Enzymatic Nucleic acid
uccuccauggaggaaacucccuucaaggacaucguccgggucauagcu

SEQ ID NO: 8087 - RNA, 48 nt, Artificial Sequence
  Description of Artificial Sequence:  Enzymatic Nucleic acid
ucuuccucggaggaaacucccuucaaggacaucguccgggaucucaua

SEQ ID NO: 8088 - RNA, 48 nt, Artificial Sequence
  Description of Artificial Sequence:  Enzymatic Nucleic acid
gucuuccuggaggaaacucccuucaaggacaucguccgggcaucucau

SEQ ID NO: 8089 - RNA, 48 nt, Artificial Sequence
  Description of Artificial Sequence:  Enzymatic Nucleic acid
ccgucuucggaggaaacucccuucaaggacaucguccggguccaucuc

SEQ ID NO: 8090 - RNA, 48 nt, Artificial Sequence
  Description of Artificial Sequence:  Enzymatic Nucleic acid
gccgucuuggaggaaacucccuucaaggacaucguccgggcuccaucu

SEQ ID NO: 8091 - RNA, 48 nt, Artificial Sequence
  Description of Artificial Sequence:  Enzymatic Nucleic acid
gacgccguggaggaaacucccuucaaggacaucguccggguuccucca

SEQ ID NO: 8092 - RNA, 48 nt, Artificial Sequence
  Description of Artificial Sequence:  Enzymatic Nucleic acid
gcggacgcggaggaaacucccuucaaggacaucguccggggucuuccu

SEQ ID NO: 8093 - RNA, 48 nt, Artificial Sequence
  Description of Artificial Sequence:  Enzymatic Nucleic acid
ugcggacgggaggaaacucccuucaaggacaucguccgggcgucuucc

SEQ ID NO: 8094 - RNA, 48 nt, Artificial Sequence
  Description of Artificial Sequence:  Enzymatic Nucleic acid
cuugcggaggaggaaacucccuucaaggacaucguccggggccgucuu

SEQ ID NO: 8095 - RNA, 48 nt, Artificial Sequence
  Description of Artificial Sequence:  Enzymatic Nucleic acid
uacacuugggaggaaacucccuucaaggacaucguccgggggacgccg

SEQ ID NO: 8096 - RNA, 48 nt, Artificial Sequence
  Description of Artificial Sequence:  Enzymatic Nucleic acid
uucuuacaggaggaaacucccuucaaggacaucguccggguugcggac

SEQ ID NO: 8097 - RNA, 48 nt, Artificial Sequence
  Description of Artificial Sequence:  Enzymatic Nucleic acid
acuucuuaggaggaaacucccuucaaggacaucguccgggacuugcgg

SEQ ID NO: 8098 - RNA, 48 nt, Artificial Sequence
  Description of Artificial Sequence:  Enzymatic Nucleic acid
ucgcacuuggaggaaacucccuucaaggacaucguccggguuacacuu

SEQ ID NO: 8099 - RNA, 48 nt, Artificial Sequence
  Description of Artificial Sequence:  Enzymatic Nucleic acid
ccuucgcaggaggaaacucccuucaaggacaucguccggguucuuaca

SEQ ID NO: 8100 - RNA, 48 nt, Artificial Sequence
  Description of Artificial Sequence:  Enzymatic Nucleic acid
gcccuucgggaggaaacucccuucaaggacaucguccgggacuucuua

SEQ ID NO: 8101 - RNA, 48 nt, Artificial Sequence
  Description of Artificial Sequence:  Enzymatic Nucleic acid
aggcccuuggaggaaacucccuucaaggacaucguccggggcacuucu

SEQ ID NO: 8102 - RNA, 48 nt, Artificial Sequence
  Description of Artificial Sequence:  Enzymatic Nucleic acid
gcaaggccggaggaaacucccuucaaggacaucguccggguucgcacu

SEQ ID NO: 8103 - RNA, 48 nt, Artificial Sequence
  Description of Artificial Sequence:  Enzymatic Nucleic acid
ggcaaggcggaggaaacucccuucaaggacaucguccgggcuucgcac

SEQ ID NO: 8104 - RNA, 48 nt, Artificial Sequence
  Description of Artificial Sequence:  Enzymatic Nucleic acid
cggcaaggggaggaaacucccuucaaggacaucguccgggccuucgca

SEQ ID NO: 8105 - RNA, 48 nt, Artificial Sequence
  Description of Artificial Sequence:  Enzymatic Nucleic acid
cuuugcggggaggaaacucccuucaaggacaucguccgggaaggcccu

SEQ ID NO: 8106 - RNA, 48 nt, Artificial Sequence
  Description of Artificial Sequence:  Enzymatic Nucleic acid
acacuuugggaggaaacucccuucaaggacaucguccgggggcaaggc

SEQ ID NO: 8107 - RNA, 48 nt, Artificial Sequence
  Description of Artificial Sequence:  Enzymatic Nucleic acid
guuacacaggaggaaacucccuucaaggacaucguccggguuugcggc

SEQ ID NO: 8108 - RNA, 48 nt, Artificial Sequence
  Description of Artificial Sequence:  Enzymatic Nucleic acid
ccguuacaggaggaaacucccuucaaggacaucguccgggacuuugcg

SEQ ID NO: 8109 - RNA, 48 nt, Artificial Sequence
  Description of Artificial Sequence:  Enzymatic Nucleic acid
uuccguuaggaggaaacucccuucaaggacaucguccgggacacuuug

SEQ ID NO: 8110 - RNA, 48 nt, Artificial Sequence
  Description of Artificial Sequence:  Enzymatic Nucleic acid
accuauucggaggaaacucccuucaaggacaucguccgggguuacaca

SEQ ID NO: 8111 - RNA, 48 nt, Artificial Sequence
  Description of Artificial Sequence:  Enzymatic Nucleic acid
uaccuauuggaggaaacucccuucaaggacaucguccgggcguuacac

SEQ ID NO: 8112 - RNA, 48 nt, Artificial Sequence
  Description of Artificial Sequence:  Enzymatic Nucleic acid
accaauacggaggaaacucccuucaaggacaucguccggguauuccgu

SEQ ID NO: 8113 - RNA, 48 nt, Artificial Sequence
  Description of Artificial Sequence:  Enzymatic Nucleic acid
caccaauaggaggaaacucccuucaaggacaucguccgggcuauuccg

SEQ ID NO: 8114 - RNA, 48 nt, Artificial Sequence
  Description of Artificial Sequence:  Enzymatic Nucleic acid
aaauucacggaggaaacucccuucaaggacaucguccgggaauaccua

SEQ ID NO: 8115 - RNA, 48 nt, Artificial Sequence
  Description of Artificial Sequence:  Enzymatic Nucleic acid
uaaauucaggaggaaacucccuucaaggacaucguccgggcaauaccu

SEQ ID NO: 8116 - RNA, 48 nt, Artificial Sequence
  Description of Artificial Sequence:  Enzymatic Nucleic acid
uuuaaauuggaggaaacucccuucaaggacaucguccgggaccaauac

SEQ ID NO: 8117 - RNA, 48 nt, Artificial Sequence
  Description of Artificial Sequence:  Enzymatic Nucleic acid
gagugaguggaggaaacucccuucaaggacaucguccggguuuaaauu

SEQ ID NO: 8118 - RNA, 48 nt, Artificial Sequence
  Description of Artificial Sequence:  Enzymatic Nucleic acid
auucguagggaggaaacucccuucaaggacaucguccgggauuuaugg

SEQ ID NO: 8119 - RNA, 48 nt, Artificial Sequence
  Description of Artificial Sequence:  Enzymatic Nucleic acid
uuaauauuggaggaaacucccuucaaggacaucguccgggguagcauu

SEQ ID NO: 8120 - RNA, 48 nt, Artificial Sequence
  Description of Artificial Sequence:  Enzymatic Nucleic acid
uggaggugggaggaaacucccuucaaggacaucguccgggaguuuuug

SEQ ID NO: 8121 - RNA, 48 nt, Artificial Sequence
  Description of Artificial Sequence:  Enzymatic Nucleic acid
gaucgccaggaggaaacucccuucaaggacaucguccgggugauggag

SEQ ID NO: 8122 - RNA, 48 nt, Artificial Sequence
  Description of Artificial Sequence:  Enzymatic Nucleic acid
gagaucgcggaggaaacucccuucaaggacaucguccgggacugaugg

SEQ ID NO: 8123 - RNA, 48 nt, Artificial Sequence
  Description of Artificial Sequence:  Enzymatic Nucleic acid
ggagaucgggaggaaacucccuucaaggacaucguccgggcacugaug

SEQ ID NO: 8124 - RNA, 48 nt, Artificial Sequence
  Description of Artificial Sequence:  Enzymatic Nucleic acid
guggagauggaggaaacucccuucaaggacaucguccggggccacuga

SEQ ID NO: 8125 - RNA, 48 nt, Artificial Sequence
  Description of Artificial Sequence:  Enzymatic Nucleic acid
gccaccggggaggaaacucccuucaaggacaucguccgggaggaugug

SEQ ID NO: 8126 - RNA, 48 nt, Artificial Sequence
  Description of Artificial Sequence:  Enzymatic Nucleic acid
aaugccacggaggaaacucccuucaaggacaucguccgggggcaggau

SEQ ID NO: 8127 - RNA, 48 nt, Artificial Sequence
  Description of Artificial Sequence:  Enzymatic Nucleic acid
aaaugccaggaggaaacucccuucaaggacaucguccgggcggcagga

SEQ ID NO: 8128 - RNA, 48 nt, Artificial Sequence
  Description of Artificial Sequence:  Enzymatic Nucleic acid
cuaaaugcggaggaaacucccuucaaggacaucguccgggaccggcag

SEQ ID NO: 8129 - RNA, 48 nt, Artificial Sequence
  Description of Artificial Sequence:  Enzymatic Nucleic acid
ccuaaaugggaggaaacucccuucaaggacaucguccgggcaccggca

SEQ ID NO: 8130 - RNA, 48 nt, Artificial Sequence
  Description of Artificial Sequence:  Enzymatic Nucleic acid
agucacccggaggaaacucccuucaaggacaucguccggguaaaugcc

SEQ ID NO: 8131 - RNA, 48 nt, Artificial Sequence
  Description of Artificial Sequence:  Enzymatic Nucleic acid
gagucaccggaggaaacucccuucaaggacaucguccgggcuaaaugc

SEQ ID NO: 8132 - RNA, 48 nt, Artificial Sequence
  Description of Artificial Sequence:  Enzymatic Nucleic acid
ggagucacggaggaaacucccuucaaggacaucguccgggccuaaaug

SEQ ID NO: 8133 - RNA, 48 nt, Artificial Sequence
  Description of Artificial Sequence:  Enzymatic Nucleic acid
aggagucaggaggaaacucccuucaaggacaucguccgggcccuaaau

SEQ ID NO: 8134 - RNA, 48 nt, Artificial Sequence
  Description of Artificial Sequence:  Enzymatic Nucleic acid
gaaggaguggaggaaacucccuucaaggacaucguccgggaccccuaa

SEQ ID NO: 8135 - RNA, 48 nt, Artificial Sequence
  Description of Artificial Sequence:  Enzymatic Nucleic acid
uguggaucggaggaaacucccuucaaggacaucguccgggagaggagg

SEQ ID NO: 8136 - RNA, 48 nt, Artificial Sequence
  Description of Artificial Sequence:  Enzymatic Nucleic acid
cuguggauggaggaaacucccuucaaggacaucguccgggcagaggag

SEQ ID NO: 8137 - RNA, 48 nt, Artificial Sequence
  Description of Artificial Sequence:  Enzymatic Nucleic acid
uccaguucggaggaaacucccuucaaggacaucguccggguguggauc

SEQ ID NO: 8138 - RNA, 48 nt, Artificial Sequence
  Description of Artificial Sequence:  Enzymatic Nucleic acid
auccaguuggaggaaacucccuucaaggacaucguccgggcuguggau

SEQ ID NO: 8139 - RNA, 48 nt, Artificial Sequence
  Description of Artificial Sequence:  Enzymatic Nucleic acid
agaauaucggaggaaacucccuucaaggacaucguccgggaguuccug

SEQ ID NO: 8140 - RNA, 48 nt, Artificial Sequence
  Description of Artificial Sequence:  Enzymatic Nucleic acid
cagaauauggaggaaacucccuucaaggacaucguccgggcaguuccu

SEQ ID NO: 8141 - RNA, 48 nt, Artificial Sequence
  Description of Artificial Sequence:  Enzymatic Nucleic acid
acgguuuuggaggaaacucccuucaaggacaucguccgggagaauauc

SEQ ID NO: 8142 - RNA, 48 nt, Artificial Sequence
  Description of Artificial Sequence:  Enzymatic Nucleic acid
uuccuuuaggaggaaacucccuucaaggacaucguccggggguuuuca

SEQ ID NO: 8143 - RNA, 48 nt, Artificial Sequence
  Description of Artificial Sequence:  Enzymatic Nucleic acid
gugauuucggaggaaacucccuucaaggacaucguccggguuuacggu

SEQ ID NO: 8144 - RNA, 48 nt, Artificial Sequence
  Description of Artificial Sequence:  Enzymatic Nucleic acid
ugugauuuggaggaaacucccuucaaggacaucguccgggcuuuacgg

SEQ ID NO: 8145 - RNA, 48 nt, Artificial Sequence
  Description of Artificial Sequence:  Enzymatic Nucleic acid
caaaaaccggaggaaacucccuucaaggacaucguccgggugugauuu

SEQ ID NO: 8146 - RNA, 48 nt, Artificial Sequence
  Description of Artificial Sequence:  Enzymatic Nucleic acid
gcaaaaacggaggaaacucccuucaaggacaucguccgggcugugauu

SEQ ID NO: 8147 - RNA, 48 nt, Artificial Sequence
  Description of Artificial Sequence:  Enzymatic Nucleic acid
agcaaaaaggaggaaacucccuucaaggacaucguccgggccugugau

SEQ ID NO: 8148 - RNA, 48 nt, Artificial Sequence
  Description of Artificial Sequence:  Enzymatic Nucleic acid
ugaaucagggaggaaacucccuucaaggacaucguccgggaaaaaccc

SEQ ID NO: 8149 - RNA, 48 nt, Artificial Sequence
  Description of Artificial Sequence:  Enzymatic Nucleic acid
gccugaauggaggaaacucccuucaaggacaucguccgggagcaaaaa

SEQ ID NO: 8150 - RNA, 48 nt, Artificial Sequence
  Description of Artificial Sequence:  Enzymatic Nucleic acid
ggccaagcggaggaaacucccuucaaggacaucguccgggugaaucag

SEQ ID NO: 8151 - RNA, 48 nt, Artificial Sequence
  Description of Artificial Sequence:  Enzymatic Nucleic acid
aggccaagggaggaaacucccuucaaggacaucguccgggcugaauca

SEQ ID NO: 8152 - RNA, 48 nt, Artificial Sequence
  Description of Artificial Sequence:  Enzymatic Nucleic acid
uuucaggcggaggaaacucccuucaaggacaucguccgggaagccuga

SEQ ID NO: 8153 - RNA, 48 nt, Artificial Sequence
  Description of Artificial Sequence:  Enzymatic Nucleic acid
uuuucaggggaggaaacucccuucaaggacaucguccgggcaagccug

SEQ ID NO: 8154 - RNA, 48 nt, Artificial Sequence
  Description of Artificial Sequence:  Enzymatic Nucleic acid
ccuguuuuggaggaaacucccuucaaggacaucguccgggaggccaag

SEQ ID NO: 8155 - RNA, 48 nt, Artificial Sequence
  Description of Artificial Sequence:  Enzymatic Nucleic acid
gguccgucggaggaaacucccuucaaggacaucguccggguguuuuca

SEQ ID NO: 8156 - RNA, 48 nt, Artificial Sequence
  Description of Artificial Sequence:  Enzymatic Nucleic acid
agguccguggaggaaacucccuucaaggacaucguccgggcuguuuuc

SEQ ID NO: 8157 - RNA, 48 nt, Artificial Sequence
  Description of Artificial Sequence:  Enzymatic Nucleic acid
uggaggucggaggaaacucccuucaaggacaucguccgggguccuguu

SEQ ID NO: 8158 - RNA, 48 nt, Artificial Sequence
  Description of Artificial Sequence:  Enzymatic Nucleic acid
auggagguggaggaaacucccuucaaggacaucguccgggcguccugu

SEQ ID NO: 8159 - RNA, 48 nt, Artificial Sequence
  Description of Artificial Sequence:  Enzymatic Nucleic acid
cucaaaggggaggaaacucccuucaaggacaucguccgggauggaggu

SEQ ID NO: 8160 - RNA, 48 nt, Artificial Sequence
  Description of Artificial Sequence:  Enzymatic Nucleic acid
uagguucuggaggaaacucccuucaaggacaucguccgggaaaggcau

SEQ ID NO: 8161 - RNA, 48 nt, Artificial Sequence
  Description of Artificial Sequence:  Enzymatic Nucleic acid
ucuagguuggaggaaacucccuucaaggacaucguccgggucaaaggc

SEQ ID NO: 8162 - RNA, 48 nt, Artificial Sequence
  Description of Artificial Sequence:  Enzymatic Nucleic acid
uaugauuuggaggaaacucccuucaaggacaucguccggguagguucu

SEQ ID NO: 8163 - RNA, 48 nt, Artificial Sequence
  Description of Artificial Sequence:  Enzymatic Nucleic acid
uccugccgggaggaaacucccuucaaggacaucguccgggguaugauu

SEQ ID NO: 8164 - RNA, 48 nt, Artificial Sequence
  Description of Artificial Sequence:  Enzymatic Nucleic acid
gguccugcggaggaaacucccuucaaggacaucguccggggcguauga

SEQ ID NO: 8165 - RNA, 48 nt, Artificial Sequence
  Description of Artificial Sequence:  Enzymatic Nucleic acid
ugguccugggaggaaacucccuucaaggacaucguccgggcgcguaug

SEQ ID NO: 8166 - RNA, 48 nt, Artificial Sequence
  Description of Artificial Sequence:  Enzymatic Nucleic acid
gcuuggucggaggaaacucccuucaaggacaucguccgggugccgcgu

SEQ ID NO: 8167 - RNA, 48 nt, Artificial Sequence
  Description of Artificial Sequence:  Enzymatic Nucleic acid
ugcuugguggaggaaacucccuucaaggacaucguccgggcugccgcg

SEQ ID NO: 8168 - RNA, 48 nt, Artificial Sequence
  Description of Artificial Sequence:  Enzymatic Nucleic acid
ccauguugggaggaaacucccuucaaggacaucguccggguugguccu

SEQ ID NO: 8169 - RNA, 48 nt, Artificial Sequence
  Description of Artificial Sequence:  Enzymatic Nucleic acid
aaacugacggaggaaacucccuucaaggacaucguccgggauguugcu

SEQ ID NO: 8170 - RNA, 48 nt, Artificial Sequence
  Description of Artificial Sequence:  Enzymatic Nucleic acid
aaaacugaggaggaaacucccuucaaggacaucguccgggcauguugc

SEQ ID NO: 8171 - RNA, 48 nt, Artificial Sequence
  Description of Artificial Sequence:  Enzymatic Nucleic acid
agagaaaaggaggaaacucccuucaaggacaucguccgggugaccaug

SEQ ID NO: 8172 - RNA, 48 nt, Artificial Sequence
  Description of Artificial Sequence:  Enzymatic Nucleic acid
gacgacugggaggaaacucccuucaaggacaucguccgggaagagaaa

SEQ ID NO: 8173 - RNA, 48 nt, Artificial Sequence
  Description of Artificial Sequence:  Enzymatic Nucleic acid
gcugacgaggaggaaacucccuucaaggacaucguccgggugcaagag

SEQ ID NO: 8174 - RNA, 48 nt, Artificial Sequence
  Description of Artificial Sequence:  Enzymatic Nucleic acid
caggcugaggaggaaacucccuucaaggacaucguccggggacugcaa

SEQ ID NO: 8175 - RNA, 48 nt, Artificial Sequence
  Description of Artificial Sequence:  Enzymatic Nucleic acid
uguucaggggaggaaacucccuucaaggacaucguccgggugacgacu

SEQ ID NO: 8176 - RNA, 48 nt, Artificial Sequence
  Description of Artificial Sequence:  Enzymatic Nucleic acid
guuauguuggaggaaacucccuucaaggacaucguccgggaggcugac

SEQ ID NO: 8177 - RNA, 48 nt, Artificial Sequence
  Description of Artificial Sequence:  Enzymatic Nucleic acid
cguaauccggaggaaacucccuucaaggacaucguccgggaaggaugu

SEQ ID NO: 8178 - RNA, 48 nt, Artificial Sequence
  Description of Artificial Sequence:  Enzymatic Nucleic acid
gcguaaucggaggaaacucccuucaaggacaucguccgggcaaggaug

SEQ ID NO: 8179 - RNA, 48 nt, Artificial Sequence
  Description of Artificial Sequence:  Enzymatic Nucleic acid
agcguaauggaggaaacucccuucaaggacaucguccgggccaaggau

SEQ ID NO: 8180 - RNA, 48 nt, Artificial Sequence
  Description of Artificial Sequence:  Enzymatic Nucleic acid
ugagggagggaggaaacucccuucaaggacaucguccgggguaauccc

SEQ ID NO: 8181 - RNA, 48 nt, Artificial Sequence
  Description of Artificial Sequence:  Enzymatic Nucleic acid
cuuaucucggaggaaacucccuucaaggacaucguccggguugaggga

SEQ ID NO: 8182 - RNA, 48 nt, Artificial Sequence
  Description of Artificial Sequence:  Enzymatic Nucleic acid
acuuaucuggaggaaacucccuucaaggacaucguccgggcuugaggg

SEQ ID NO: 8183 - RNA, 48 nt, Artificial Sequence
  Description of Artificial Sequence:  Enzymatic Nucleic acid
ucacuuauggaggaaacucccuucaaggacaucguccggguccuugag

SEQ ID NO: 8184 - RNA, 48 nt, Artificial Sequence
  Description of Artificial Sequence:  Enzymatic Nucleic acid
cuccaucaggaggaaacucccuucaaggacaucguccggguuaucucc

SEQ ID NO: 8185 - RNA, 48 nt, Artificial Sequence
  Description of Artificial Sequence:  Enzymatic Nucleic acid
aucuccauggaggaaacucccuucaaggacaucguccgggacuuaucu

SEQ ID NO: 8186 - RNA, 48 nt, Artificial Sequence
  Description of Artificial Sequence:  Enzymatic Nucleic acid
cacaucucggaggaaacucccuucaaggacaucguccgggaucacuua

SEQ ID NO: 8187 - RNA, 48 nt, Artificial Sequence
  Description of Artificial Sequence:  Enzymatic Nucleic acid
ucacaucuggaggaaacucccuucaaggacaucguccgggcaucacuu

SEQ ID NO: 8188 - RNA, 48 nt, Artificial Sequence
  Description of Artificial Sequence:  Enzymatic Nucleic acid
uaucacauggaggaaacucccuucaaggacaucguccggguccaucac

SEQ ID NO: 8189 - RNA, 48 nt, Artificial Sequence
  Description of Artificial Sequence:  Enzymatic Nucleic acid
aauuaucaggaggaaacucccuucaaggacaucguccgggaucuccau

SEQ ID NO: 8190 - RNA, 48 nt, Artificial Sequence
  Description of Artificial Sequence:  Enzymatic Nucleic acid
gaaauuauggaggaaacucccuucaaggacaucguccgggacaucucc

SEQ ID NO: 8191 - RNA, 48 nt, Artificial Sequence
  Description of Artificial Sequence:  Enzymatic Nucleic acid
uuuguuucggaggaaacucccuucaaggacaucguccgggugaaauua

SEQ ID NO: 8192 - RNA, 48 nt, Artificial Sequence
  Description of Artificial Sequence:  Enzymatic Nucleic acid
uuuuguuuggaggaaacucccuucaaggacaucguccgggcugaaauu

SEQ ID NO: 8193 - RNA, 48 nt, Artificial Sequence
  Description of Artificial Sequence:  Enzymatic Nucleic acid
gcauagcaggaggaaacucccuucaaggacaucguccgggaaauuuuu

SEQ ID NO: 8194 - RNA, 48 nt, Artificial Sequence
  Description of Artificial Sequence:  Enzymatic Nucleic acid
uugcauagggaggaaacucccuucaaggacaucguccgggacaaauuu

SEQ ID NO: 8195 - RNA, 48 nt, Artificial Sequence
  Description of Artificial Sequence:  Enzymatic Nucleic acid
uguauuugggaggaaacucccuucaaggacaucguccgggauagcaca

SEQ ID NO: 8196 - RNA, 48 nt, Artificial Sequence
  Description of Artificial Sequence:  Enzymatic Nucleic acid
guuuuuucggaggaaacucccuucaaggacaucguccgggaguuuauu

SEQ ID NO: 8197 - RNA, 48 nt, Artificial Sequence
  Description of Artificial Sequence:  Enzymatic Nucleic acid
aguuuuuuggaggaaacucccuucaaggacaucguccgggcaguuuau

SEQ ID NO: 8198 - RNA, 48 nt, Artificial Sequence
  Description of Artificial Sequence:  Enzymatic Nucleic acid
gucccaaaggaggaaacucccuucaaggacaucguccgggaguuuuuu

SEQ ID NO: 8199 - RNA, 48 nt, Artificial Sequence
  Description of Artificial Sequence:  Enzymatic Nucleic acid
ggagguccggaggaaacucccuucaaggacaucguccgggaaacaguu

SEQ ID NO: 8200 - RNA, 48 nt, Artificial Sequence
  Description of Artificial Sequence:  Enzymatic Nucleic acid
cggaggucggaggaaacucccuucaaggacaucguccgggcaaacagu

SEQ ID NO: 8201 - RNA, 48 nt, Artificial Sequence
  Description of Artificial Sequence:  Enzymatic Nucleic acid
ccggagguggaggaaacucccuucaaggacaucguccgggccaaacag

SEQ ID NO: 8202 - RNA, 48 nt, Artificial Sequence
  Description of Artificial Sequence:  Enzymatic Nucleic acid
uuucugacggaggaaacucccuucaaggacaucguccgggggaggucc

SEQ ID NO: 8203 - RNA, 48 nt, Artificial Sequence
  Description of Artificial Sequence:  Enzymatic Nucleic acid
uuuucugaggaggaaacucccuucaaggacaucguccgggcggagguc

SEQ ID NO: 8204 - RNA, 48 nt, Artificial Sequence
  Description of Artificial Sequence:  Enzymatic Nucleic acid
uugguuuuggaggaaacucccuucaaggacaucguccgggugaccgga

SEQ ID NO: 8205 - RNA, 48 nt, Artificial Sequence
  Description of Artificial Sequence:  Enzymatic Nucleic acid
cucuguugggaggaaacucccuucaaggacaucguccggguuauaauu

SEQ ID NO: 8206 - RNA, 48 nt, Artificial Sequence
  Description of Artificial Sequence:  Enzymatic Nucleic acid
uuucaccuggaggaaacucccuucaaggacaucguccggguguugcuu

SEQ ID NO: 8207 - RNA, 48 nt, Artificial Sequence
  Description of Artificial Sequence:  Enzymatic Nucleic acid
guuuucacggaggaaacucccuucaaggacaucguccgggucuguugc

SEQ ID NO: 8208 - RNA, 48 nt, Artificial Sequence
  Description of Artificial Sequence:  Enzymatic Nucleic acid
uguuuucaggaggaaacucccuucaaggacaucguccgggcucuguug

SEQ ID NO: 8209 - RNA, 48 nt, Artificial Sequence
  Description of Artificial Sequence:  Enzymatic Nucleic acid
gcuguuuuggaggaaacucccuucaaggacaucguccgggaccucugu

SEQ ID NO: 8210 - RNA, 48 nt, Artificial Sequence
  Description of Artificial Sequence:  Enzymatic Nucleic acid
ccuugcagggaggaaacucccuucaaggacaucguccggguguuuuca

SEQ ID NO: 8211 - RNA, 48 nt, Artificial Sequence
  Description of Artificial Sequence:  Enzymatic Nucleic acid
uggccuugggaggaaacucccuucaaggacaucguccgggagcuguuu

SEQ ID NO: 8212 - RNA, 48 nt, Artificial Sequence
  Description of Artificial Sequence:  Enzymatic Nucleic acid
ccuguggcggaggaaacucccuucaaggacaucguccggguugcagcu

SEQ ID NO: 8213 - RNA, 48 nt, Artificial Sequence
  Description of Artificial Sequence:  Enzymatic Nucleic acid
gccuguggggaggaaacucccuucaaggacaucguccgggcuugcagc

SEQ ID NO: 8214 - RNA, 48 nt, Artificial Sequence
  Description of Artificial Sequence:  Enzymatic Nucleic acid
gaccuggcggaggaaacucccuucaaggacaucguccggguguggccu

SEQ ID NO: 8215 - RNA, 48 nt, Artificial Sequence
  Description of Artificial Sequence:  Enzymatic Nucleic acid
agaccuggggaggaaacucccuucaaggacaucguccgggcuguggcc

SEQ ID NO: 8216 - RNA, 48 nt, Artificial Sequence
  Description of Artificial Sequence:  Enzymatic Nucleic acid
uggcagacggaggaaacucccuucaaggacaucguccggguggccugu

SEQ ID NO: 8217 - RNA, 48 nt, Artificial Sequence
  Description of Artificial Sequence:  Enzymatic Nucleic acid
auggcagaggaggaaacucccuucaaggacaucguccgggcuggccug

SEQ ID NO: 8218 - RNA, 48 nt, Artificial Sequence
  Description of Artificial Sequence:  Enzymatic Nucleic acid
aggcauggggaggaaacucccuucaaggacaucguccgggagaccugg

SEQ ID NO: 8219 - RNA, 48 nt, Artificial Sequence
  Description of Artificial Sequence:  Enzymatic Nucleic acid
gcacaaggggaggaaacucccuucaaggacaucguccgggauggcaga

SEQ ID NO: 8220 - RNA, 48 nt, Artificial Sequence
  Description of Artificial Sequence:  Enzymatic Nucleic acid
ggggagcaggaggaaacucccuucaaggacaucguccgggaaggcaug

SEQ ID NO: 8221 - RNA, 48 nt, Artificial Sequence
  Description of Artificial Sequence:  Enzymatic Nucleic acid
cgggggagggaggaaacucccuucaaggacaucguccgggacaaggca

SEQ ID NO: 8222 - RNA, 48 nt, Artificial Sequence
  Description of Artificial Sequence:  Enzymatic Nucleic acid
gcagcccuggaggaaacucccuucaaggacaucguccggggggggagc

SEQ ID NO: 8223 - RNA, 48 nt, Artificial Sequence
  Description of Artificial Sequence:  Enzymatic Nucleic acid
cagcagccggaggaaacucccuucaaggacaucguccgggucggggga

SEQ ID NO: 8224 - RNA, 48 nt, Artificial Sequence
  Description of Artificial Sequence:  Enzymatic Nucleic acid
ccagcagcggaggaaacucccuucaaggacaucguccgggcucggggg

SEQ ID NO: 8225 - RNA, 48 nt, Artificial Sequence
  Description of Artificial Sequence:  Enzymatic Nucleic acid
cccagcagggaggaaacucccuucaaggacaucguccgggccucgggg

SEQ ID NO: 8226 - RNA, 48 nt, Artificial Sequence
  Description of Artificial Sequence:  Enzymatic Nucleic acid
ggccccagggaggaaacucccuucaaggacaucguccgggagcccucg

SEQ ID NO: 8227 - RNA, 48 nt, Artificial Sequence
  Description of Artificial Sequence:  Enzymatic Nucleic acid
ccgggcccggaggaaacucccuucaaggacaucguccgggagcagccc

SEQ ID NO: 8228 - RNA, 48 nt, Artificial Sequence
  Description of Artificial Sequence:  Enzymatic Nucleic acid
uccgggccggaggaaacucccuucaaggacaucguccgggcagcagcc

SEQ ID NO: 8229 - RNA, 48 nt, Artificial Sequence
  Description of Artificial Sequence:  Enzymatic Nucleic acid
cuccgggcggaggaaacucccuucaaggacaucguccgggccagcagc

SEQ ID NO: 8230 - RNA, 48 nt, Artificial Sequence
  Description of Artificial Sequence:  Enzymatic Nucleic acid
gcuccgggggaggaaacucccuucaaggacaucguccgggcccagcag

SEQ ID NO: 8231 - RNA, 48 nt, Artificial Sequence
  Description of Artificial Sequence:  Enzymatic Nucleic acid
cugggcucggaggaaacucccuucaaggacaucguccggggggcccca

SEQ ID NO: 8232 - RNA, 48 nt, Artificial Sequence
  Description of Artificial Sequence:  Enzymatic Nucleic acid
ccugggcuggaggaaacucccuucaaggacaucguccgggcgggcccc

SEQ ID NO: 8233 - RNA, 48 nt, Artificial Sequence
  Description of Artificial Sequence:  Enzymatic Nucleic acid
ucccugggggaggaaacucccuucaaggacaucguccggguccgggcc

SEQ ID NO: 8234 - RNA, 48 nt, Artificial Sequence
  Description of Artificial Sequence:  Enzymatic Nucleic acid
cgcaguccggaggaaacucccuucaaggacaucguccgggugggcucc

SEQ ID NO: 8235 - RNA, 48 nt, Artificial Sequence
  Description of Artificial Sequence:  Enzymatic Nucleic acid
acgcagucggaggaaacucccuucaaggacaucguccgggcugggcuc

SEQ ID NO: 8236 - RNA, 48 nt, Artificial Sequence
  Description of Artificial Sequence:  Enzymatic Nucleic acid
gacgcaguggaggaaacucccuucaaggacaucguccgggccugggcu

SEQ ID NO: 8237 - RNA, 48 nt, Artificial Sequence
  Description of Artificial Sequence:  Enzymatic Nucleic acid
aagagacgggaggaaacucccuucaaggacaucguccgggagucccug

SEQ ID NO: 8238 - RNA, 48 nt, Artificial Sequence
  Description of Artificial Sequence:  Enzymatic Nucleic acid
gcaagagaggaggaaacucccuucaaggacaucguccggggcaguccc

SEQ ID NO: 8239 - RNA, 48 nt, Artificial Sequence
  Description of Artificial Sequence:  Enzymatic Nucleic acid
cauuccggggaggaaacucccuucaaggacaucguccgggaagagacg

SEQ ID NO: 8240 - RNA, 48 nt, Artificial Sequence
  Description of Artificial Sequence:  Enzymatic Nucleic acid
ugacauucggaggaaacucccuucaaggacaucguccgggggcaagag

SEQ ID NO: 8241 - RNA, 48 nt, Artificial Sequence
  Description of Artificial Sequence:  Enzymatic Nucleic acid
cugacauuggaggaaacucccuucaaggacaucguccgggcggcaaga

SEQ ID NO: 8242 - RNA, 48 nt, Artificial Sequence
  Description of Artificial Sequence:  Enzymatic Nucleic acid
ucggcugaggaggaaacucccuucaaggacaucguccgggauuccggc

SEQ ID NO: 8243 - RNA, 48 nt, Artificial Sequence
  Description of Artificial Sequence:  Enzymatic Nucleic acid
ugccucggggaggaaacucccuucaaggacaucguccgggugacauuc

SEQ ID NO: 8244 - RNA, 48 nt, Artificial Sequence
  Description of Artificial Sequence:  Enzymatic Nucleic acid
cccugccuggaggaaacucccuucaaggacaucguccgggggcugaca

SEQ ID NO: 8245 - RNA, 48 nt, Artificial Sequence
  Description of Artificial Sequence:  Enzymatic Nucleic acid
uucccugcggaggaaacucccuucaaggacaucguccgggucggcuga

SEQ ID NO: 8246 - RNA, 48 nt, Artificial Sequence
  Description of Artificial Sequence:  Enzymatic Nucleic acid
auucccugggaggaaacucccuucaaggacaucguccgggcucggcug

SEQ ID NO: 8247 - RNA, 48 nt, Artificial Sequence
  Description of Artificial Sequence:  Enzymatic Nucleic acid
cgcauuccggaggaaacucccuucaaggacaucguccgggugccucgg

SEQ ID NO: 8248 - RNA, 48 nt, Artificial Sequence
  Description of Artificial Sequence:  Enzymatic Nucleic acid
acgcauucggaggaaacucccuucaaggacaucguccgggcugccucg

SEQ ID NO: 8249 - RNA, 48 nt, Artificial Sequence
  Description of Artificial Sequence:  Enzymatic Nucleic acid
cacgcauuggaggaaacucccuucaaggacaucguccgggccugccuc

SEQ ID NO: 8250 - RNA, 48 nt, Artificial Sequence
  Description of Artificial Sequence:  Enzymatic Nucleic acid
uguccacgggaggaaacucccuucaaggacaucguccgggauucccug

SEQ ID NO: 8251 - RNA, 48 nt, Artificial Sequence
  Description of Artificial Sequence:  Enzymatic Nucleic acid
cuuguccaggaggaaacucccuucaaggacaucguccggggcauuccc

SEQ ID NO: 8252 - RNA, 48 nt, Artificial Sequence
  Description of Artificial Sequence:  Enzymatic Nucleic acid
cacuugucggaggaaacucccuucaaggacaucguccgggacgcauuc

SEQ ID NO: 8253 - RNA, 48 nt, Artificial Sequence
  Description of Artificial Sequence:  Enzymatic Nucleic acid
gcacuuguggaggaaacucccuucaaggacaucguccgggcacgcauu

SEQ ID NO: 8254 - RNA, 48 nt, Artificial Sequence
  Description of Artificial Sequence:  Enzymatic Nucleic acid
agcuugcaggaggaaacucccuucaaggacaucguccggguuguccac

SEQ ID NO: 8255 - RNA, 48 nt, Artificial Sequence
  Description of Artificial Sequence:  Enzymatic Nucleic acid
gaagcuugggaggaaacucccuucaaggacaucguccgggacuugucc

SEQ ID NO: 8256 - RNA, 48 nt, Artificial Sequence
  Description of Artificial Sequence:  Enzymatic Nucleic acid
uccagaagggaggaaacucccuucaaggacaucguccggguugcacuu

SEQ ID NO: 8257 - RNA, 48 nt, Artificial Sequence
  Description of Artificial Sequence:  Enzymatic Nucleic acid
ucacccucggaggaaacucccuucaaggacaucguccgggagaagcuu

SEQ ID NO: 8258 - RNA, 48 nt, Artificial Sequence
  Description of Artificial Sequence:  Enzymatic Nucleic acid
cucacccuggaggaaacucccuucaaggacaucguccgggcagaagcu

SEQ ID NO: 8259 - RNA, 48 nt, Artificial Sequence
  Description of Artificial Sequence:  Enzymatic Nucleic acid
ggcucaccggaggaaacucccuucaaggacaucguccggguccagaag

SEQ ID NO: 8260 - RNA, 48 nt, Artificial Sequence
  Description of Artificial Sequence:  Enzymatic Nucleic acid
uggcucacggaggaaacucccuucaaggacaucguccgggcuccagaa

SEQ ID NO: 8261 - RNA, 48 nt, Artificial Sequence
  Description of Artificial Sequence:  Enzymatic Nucleic acid
uuggcucaggaggaaacucccuucaaggacaucguccgggccuccaga

SEQ ID NO: 8262 - RNA, 48 nt, Artificial Sequence
  Description of Artificial Sequence:  Enzymatic Nucleic acid
ccuuggcuggaggaaacucccuucaaggacaucguccgggacccucca

SEQ ID NO: 8263 - RNA, 48 nt, Artificial Sequence
  Description of Artificial Sequence:  Enzymatic Nucleic acid
ucccuuggggaggaaacucccuucaaggacaucguccgggucacccuc

SEQ ID NO: 8264 - RNA, 48 nt, Artificial Sequence
  Description of Artificial Sequence:  Enzymatic Nucleic acid
caaacuccggaggaaacucccuucaaggacaucguccggguuggcuca

SEQ ID NO: 8265 - RNA, 48 nt, Artificial Sequence
  Description of Artificial Sequence:  Enzymatic Nucleic acid
acaaacucggaggaaacucccuucaaggacaucguccgggcuuggcuc

SEQ ID NO: 8266 - RNA, 48 nt, Artificial Sequence
  Description of Artificial Sequence:  Enzymatic Nucleic acid
cacaaacuggaggaaacucccuucaaggacaucguccgggccuuggcu

SEQ ID NO: 8267 - RNA, 48 nt, Artificial Sequence
  Description of Artificial Sequence:  Enzymatic Nucleic acid
uccacaaaggaggaaacucccuucaaggacaucguccgggucccuugg

SEQ ID NO: 8268 - RNA, 48 nt, Artificial Sequence
  Description of Artificial Sequence:  Enzymatic Nucleic acid
guucuccaggaggaaacucccuucaaggacaucguccgggaaacuccc

SEQ ID NO: 8269 - RNA, 48 nt, Artificial Sequence
  Description of Artificial Sequence:  Enzymatic Nucleic acid
gaguucucggaggaaacucccuucaaggacaucguccgggacaaacuc

SEQ ID NO: 8270 - RNA, 48 nt, Artificial Sequence
  Description of Artificial Sequence:  Enzymatic Nucleic acid
agaguucuggaggaaacucccuucaaggacaucguccgggcacaaacu

SEQ ID NO: 8271 - RNA, 48 nt, Artificial Sequence
  Description of Artificial Sequence:  Enzymatic Nucleic acid
ucagaguuggaggaaacucccuucaaggacaucguccggguccacaaa

SEQ ID NO: 8272 - RNA, 48 nt, Artificial Sequence
  Description of Artificial Sequence:  Enzymatic Nucleic acid
uaugcacuggaggaaacucccuucaaggacaucguccgggagaguucu

SEQ ID NO: 8273 - RNA, 48 nt, Artificial Sequence
  Description of Artificial Sequence:  Enzymatic Nucleic acid
uguaugcaggaggaaacucccuucaaggacaucguccgggucagaguu

SEQ ID NO: 8274 - RNA, 48 nt, Artificial Sequence
  Description of Artificial Sequence:  Enzymatic Nucleic acid
acuguaugggaggaaacucccuucaaggacaucguccgggacucagag

SEQ ID NO: 8275 - RNA, 48 nt, Artificial Sequence
  Description of Artificial Sequence:  Enzymatic Nucleic acid
ggguggcaggaggaaacucccuucaaggacaucguccggguguaugca

SEQ ID NO: 8276 - RNA, 48 nt, Artificial Sequence
  Description of Artificial Sequence:  Enzymatic Nucleic acid
cuggguggggaggaaacucccuucaaggacaucguccgggacuguaug

SEQ ID NO: 8277 - RNA, 48 nt, Artificial Sequence
  Description of Artificial Sequence:  Enzymatic Nucleic acid
caggcacuggaggaaacucccuucaaggacaucguccggguggguggc

SEQ ID NO: 8278 - RNA, 48 nt, Artificial Sequence
  Description of Artificial Sequence:  Enzymatic Nucleic acid
ggcaggcaggaggaaacucccuucaaggacaucguccgggucugggug

SEQ ID NO: 8279 - RNA, 48 nt, Artificial Sequence
  Description of Artificial Sequence:  Enzymatic Nucleic acid
gaggcaggggaggaaacucccuucaaggacaucguccgggacucuggg

SEQ ID NO: 8280 - RNA, 48 nt, Artificial Sequence
  Description of Artificial Sequence:  Enzymatic Nucleic acid
gccugaggggaggaaacucccuucaaggacaucguccgggaggcacuc

SEQ ID NO: 8281 - RNA, 48 nt, Artificial Sequence
  Description of Artificial Sequence:  Enzymatic Nucleic acid
uucauggcggaggaaacucccuucaaggacaucguccgggugaggcag

SEQ ID NO: 8282 - RNA, 48 nt, Artificial Sequence
  Description of Artificial Sequence:  Enzymatic Nucleic acid
guucauggggaggaaacucccuucaaggacaucguccgggcugaggca

SEQ ID NO: 8283 - RNA, 48 nt, Artificial Sequence
  Description of Artificial Sequence:  Enzymatic Nucleic acid
gugauguuggaggaaacucccuucaaggacaucguccgggauggccug

SEQ ID NO: 8284 - RNA, 48 nt, Artificial Sequence
  Description of Artificial Sequence:  Enzymatic Nucleic acid
guccugugggaggaaacucccuucaaggacaucguccgggaggugaug

SEQ ID NO: 8285 - RNA, 48 nt, Artificial Sequence
  Description of Artificial Sequence:  Enzymatic Nucleic acid
uccccgucggaggaaacucccuucaaggacaucguccgggugugcagg

SEQ ID NO: 8286 - RNA, 48 nt, Artificial Sequence
  Description of Artificial Sequence:  Enzymatic Nucleic acid
guccccguggaggaaacucccuucaaggacaucguccgggcugugcag

SEQ ID NO: 8287 - RNA, 48 nt, Artificial Sequence
  Description of Artificial Sequence:  Enzymatic Nucleic acid
cuggucccggaggaaacucccuucaaggacaucguccgggguccugug

SEQ ID NO: 8288 - RNA, 48 nt, Artificial Sequence
  Description of Artificial Sequence:  Enzymatic Nucleic acid
ucugguccggaggaaacucccuucaaggacaucguccgggcguccugu

SEQ ID NO: 8289 - RNA, 48 nt, Artificial Sequence
  Description of Artificial Sequence:  Enzymatic Nucleic acid
gucuggucggaggaaacucccuucaaggacaucguccgggccguccug

SEQ ID NO: 8290 - RNA, 48 nt, Artificial Sequence
  Description of Artificial Sequence:  Enzymatic Nucleic acid
ugucugguggaggaaacucccuucaaggacaucguccgggcccguccu

SEQ ID NO: 8291 - RNA, 48 nt, Artificial Sequence
  Description of Artificial Sequence:  Enzymatic Nucleic acid
acaguuguggaggaaacucccuucaaggacaucguccggguggucccc

SEQ ID NO: 8292 - RNA, 48 nt, Artificial Sequence
  Description of Artificial Sequence:  Enzymatic Nucleic acid
acuggauaggaggaaacucccuucaaggacaucguccgggaguugucu

SEQ ID NO: 8293 - RNA, 48 nt, Artificial Sequence
  Description of Artificial Sequence:  Enzymatic Nucleic acid
ugggcacaggaggaaacucccuucaaggacaucguccggguggauaca

SEQ ID NO: 8294 - RNA, 48 nt, Artificial Sequence
  Description of Artificial Sequence:  Enzymatic Nucleic acid
agugggcaggaggaaacucccuucaaggacaucguccgggacuggaua

SEQ ID NO: 8295 - RNA, 48 nt, Artificial Sequence
  Description of Artificial Sequence:  Enzymatic Nucleic acid
guagugggggaggaaacucccuucaaggacaucguccgggacacugga

SEQ ID NO: 8296 - RNA, 48 nt, Artificial Sequence
  Description of Artificial Sequence:  Enzymatic Nucleic acid
ggggccguggaggaaacucccuucaaggacaucguccgggaauguagu

SEQ ID NO: 8297 - RNA, 48 nt, Artificial Sequence
  Description of Artificial Sequence:  Enzymatic Nucleic acid
gugggggcggaggaaacucccuucaaggacaucguccggggucaaugu

SEQ ID NO: 8298 - RNA, 48 nt, Artificial Sequence
  Description of Artificial Sequence:  Enzymatic Nucleic acid
agugggggggaggaaacucccuucaaggacaucguccgggcgucaaug

SEQ ID NO: 8299 - RNA, 48 nt, Artificial Sequence
  Description of Artificial Sequence:  Enzymatic Nucleic acid
ucuugacgggaggaaacucccuucaaggacaucguccgggaguggggg

SEQ ID NO: 8300 - RNA, 48 nt, Artificial Sequence
  Description of Artificial Sequence:  Enzymatic Nucleic acid
ggucuugaggaggaaacucccuucaaggacaucguccggggcaguggg

SEQ ID NO: 8301 - RNA, 48 nt, Artificial Sequence
  Description of Artificial Sequence:  Enzymatic Nucleic acid
gggcagguggaggaaacucccuucaaggacaucguccggguugacgca

SEQ ID NO: 8302 - RNA, 48 nt, Artificial Sequence
  Description of Artificial Sequence:  Enzymatic Nucleic acid
cugccgggggaggaaacucccuucaaggacaucguccgggaggucuug

SEQ ID NO: 8303 - RNA, 48 nt, Artificial Sequence
  Description of Artificial Sequence:  Enzymatic Nucleic acid
acuccugcggaggaaacucccuucaaggacaucguccggggggcaggu

SEQ ID NO: 8304 - RNA, 48 nt, Artificial Sequence
  Description of Artificial Sequence:  Enzymatic Nucleic acid
gacuccugggaggaaacucccuucaaggacaucguccgggcgggcagg

SEQ ID NO: 8305 - RNA, 48 nt, Artificial Sequence
  Description of Artificial Sequence:  Enzymatic Nucleic acid
caugacucggaggaaacucccuucaaggacaucguccgggugccgggc

SEQ ID NO: 8306 - RNA, 48 nt, Artificial Sequence
  Description of Artificial Sequence:  Enzymatic Nucleic acid
ccaugacuggaggaaacucccuucaaggacaucguccgggcugccggg

SEQ ID NO: 8307 - RNA, 48 nt, Artificial Sequence
  Description of Artificial Sequence:  Enzymatic Nucleic acid
ucccaugaggaggaaacucccuucaaggacaucguccggguccugccg

SEQ ID NO: 8308 - RNA, 48 nt, Artificial Sequence
  Description of Artificial Sequence:  Enzymatic Nucleic acid
uuuucuccggaggaaacucccuucaaggacaucguccgggaugacucc

SEQ ID NO: 8309 - RNA, 48 nt, Artificial Sequence
  Description of Artificial Sequence:  Enzymatic Nucleic acid
guuuucucggaggaaacucccuucaaggacaucguccgggcaugacuc

SEQ ID NO: 8310 - RNA, 48 nt, Artificial Sequence
  Description of Artificial Sequence:  Enzymatic Nucleic acid
uguuuucuggaggaaacucccuucaaggacaucguccgggccaugacu

SEQ ID NO: 8311 - RNA, 48 nt, Artificial Sequence
  Description of Artificial Sequence:  Enzymatic Nucleic acid
guuguuuuggaggaaacucccuucaaggacaucguccgggucccauga

SEQ ID NO: 8312 - RNA, 48 nt, Artificial Sequence
  Description of Artificial Sequence:  Enzymatic Nucleic acid
uuccagacggaggaaacucccuucaaggacaucguccgggaggguguu

SEQ ID NO: 8313 - RNA, 48 nt, Artificial Sequence
  Description of Artificial Sequence:  Enzymatic Nucleic acid
cuuccagaggaggaaacucccuucaaggacaucguccgggcagggugu

SEQ ID NO: 8314 - RNA, 48 nt, Artificial Sequence
  Description of Artificial Sequence:  Enzymatic Nucleic acid
cguacuucggaggaaacucccuucaaggacaucguccgggagaccagg

SEQ ID NO: 8315 - RNA, 48 nt, Artificial Sequence
  Description of Artificial Sequence:  Enzymatic Nucleic acid
gcguacuuggaggaaacucccuucaaggacaucguccgggcagaccag

SEQ ID NO: 8316 - RNA, 48 nt, Artificial Sequence
  Description of Artificial Sequence:  Enzymatic Nucleic acid
ucugcguaggaggaaacucccuucaaggacaucguccggguuccagac

SEQ ID NO: 8317 - RNA, 48 nt, Artificial Sequence
  Description of Artificial Sequence:  Enzymatic Nucleic acid
ggcgucugggaggaaacucccuucaaggacaucguccgggguacuucc

SEQ ID NO: 8318 - RNA, 48 nt, Artificial Sequence
  Description of Artificial Sequence:  Enzymatic Nucleic acid
gccggcguggaggaaacucccuucaaggacaucguccgggugcguacu

SEQ ID NO: 8319 - RNA, 48 nt, Artificial Sequence
  Description of Artificial Sequence:  Enzymatic Nucleic acid
auggccggggaggaaacucccuucaaggacaucguccggggucugcgu

SEQ ID NO: 8320 - RNA, 48 nt, Artificial Sequence
  Description of Artificial Sequence:  Enzymatic Nucleic acid
cacauggcggaggaaacucccuucaaggacaucguccgggggcgucug

SEQ ID NO: 8321 - RNA, 48 nt, Artificial Sequence
  Description of Artificial Sequence:  Enzymatic Nucleic acid
acacauggggaggaaacucccuucaaggacaucguccgggcggcgucu

SEQ ID NO: 8322 - RNA, 48 nt, Artificial Sequence
  Description of Artificial Sequence:  Enzymatic Nucleic acid
guggcacaggaggaaacucccuucaaggacaucguccgggauggccgg

SEQ ID NO: 8323 - RNA, 48 nt, Artificial Sequence
  Description of Artificial Sequence:  Enzymatic Nucleic acid
agguggcaggaggaaacucccuucaaggacaucguccgggacauggcc

SEQ ID NO: 8324 - RNA, 48 nt, Artificial Sequence
  Description of Artificial Sequence:  Enzymatic Nucleic acid
acagguggggaggaaacucccuucaaggacaucguccgggacacaugg

SEQ ID NO: 8325 - RNA, 48 nt, Artificial Sequence
  Description of Artificial Sequence:  Enzymatic Nucleic acid
ggauggcaggaggaaacucccuucaaggacaucguccgggagguggca

SEQ ID NO: 8326 - RNA, 48 nt, Artificial Sequence
  Description of Artificial Sequence:  Enzymatic Nucleic acid
uuggauggggaggaaacucccuucaaggacaucguccgggacaggugg

SEQ ID NO: 8327 - RNA, 48 nt, Artificial Sequence
  Description of Artificial Sequence:  Enzymatic Nucleic acid
cguaggugggaggaaacucccuucaaggacaucguccgggaguuugga

SEQ ID NO: 8328 - RNA, 48 nt, Artificial Sequence
  Description of Artificial Sequence:  Enzymatic Nucleic acid
agugcaucggaggaaacucccuucaaggacaucguccgggguaggugc

SEQ ID NO: 8329 - RNA, 48 nt, Artificial Sequence
  Description of Artificial Sequence:  Enzymatic Nucleic acid
cagugcauggaggaaacucccuucaaggacaucguccgggcguaggug

SEQ ID NO: 8330 - RNA, 48 nt, Artificial Sequence
  Description of Artificial Sequence:  Enzymatic Nucleic acid
gcccagugggaggaaacucccuucaaggacaucguccgggauccguag

SEQ ID NO: 8331 - RNA, 48 nt, Artificial Sequence
  Description of Artificial Sequence:  Enzymatic Nucleic acid
accuggccggaggaaacucccuucaaggacaucguccgggagugcauc

SEQ ID NO: 8332 - RNA, 48 nt, Artificial Sequence
  Description of Artificial Sequence:  Enzymatic Nucleic acid
gaccuggcggaggaaacucccuucaaggacaucguccgggcagugcau

SEQ ID NO: 8333 - RNA, 48 nt, Artificial Sequence
  Description of Artificial Sequence:  Enzymatic Nucleic acid
agaccuggggaggaaacucccuucaaggacaucguccgggccagugca

SEQ ID NO: 8334 - RNA, 48 nt, Artificial Sequence
  Description of Artificial Sequence:  Enzymatic Nucleic acid
uucaagacggaggaaacucccuucaaggacaucguccggguggcccag

SEQ ID NO: 8335 - RNA, 48 nt, Artificial Sequence
  Description of Artificial Sequence:  Enzymatic Nucleic acid
cuucaagaggaggaaacucccuucaaggacaucguccgggcuggccca

SEQ ID NO: 8336 - RNA, 48 nt, Artificial Sequence
  Description of Artificial Sequence:  Enzymatic Nucleic acid
acagccuuggaggaaacucccuucaaggacaucguccgggaagaccug

SEQ ID NO: 8337 - RNA, 48 nt, Artificial Sequence
  Description of Artificial Sequence:  Enzymatic Nucleic acid
uggacagcggaggaaacucccuucaaggacaucguccggguucaagac

SEQ ID NO: 8338 - RNA, 48 nt, Artificial Sequence
  Description of Artificial Sequence:  Enzymatic Nucleic acid
uuggacagggaggaaacucccuucaaggacaucguccgggcuucaaga

SEQ ID NO: 8339 - RNA, 48 nt, Artificial Sequence
  Description of Artificial Sequence:  Enzymatic Nucleic acid
ucguuggaggaggaaacucccuucaaggacaucguccgggagccuuca

SEQ ID NO: 8340 - RNA, 48 nt, Artificial Sequence
  Description of Artificial Sequence:  Enzymatic Nucleic acid
ggcccauuggaggaaacucccuucaaggacaucguccgggguuggaca

SEQ ID NO: 8341 - RNA, 48 nt, Artificial Sequence
  Description of Artificial Sequence:  Enzymatic Nucleic acid
cuuaggccggaggaaacucccuucaaggacaucguccgggauucguug

SEQ ID NO: 8342 - RNA, 48 nt, Artificial Sequence
  Description of Artificial Sequence:  Enzymatic Nucleic acid
ucuuaggcggaggaaacucccuucaaggacaucguccgggcauucguu

SEQ ID NO: 8343 - RNA, 48 nt, Artificial Sequence
  Description of Artificial Sequence:  Enzymatic Nucleic acid
aucuuaggggaggaaacucccuucaaggacaucguccgggccauucgu

SEQ ID NO: 8344 - RNA, 48 nt, Artificial Sequence
  Description of Artificial Sequence:  Enzymatic Nucleic acid
gacgggauggaggaaacucccuucaaggacaucguccggguuaggccc

SEQ ID NO: 8345 - RNA, 48 nt, Artificial Sequence
  Description of Artificial Sequence:  Enzymatic Nucleic acid
gcgauggaggaggaaacucccuucaaggacaucguccggggggaucuu

SEQ ID NO: 8346 - RNA, 48 nt, Artificial Sequence
  Description of Artificial Sequence:  Enzymatic Nucleic acid
cccaguggggaggaaacucccuucaaggacaucguccggggauggacg

SEQ ID NO: 8347 - RNA, 48 nt, Artificial Sequence
  Description of Artificial Sequence:  Enzymatic Nucleic acid
caccauccggaggaaacucccuucaaggacaucguccgggaguggcga

SEQ ID NO: 8348 - RNA, 48 nt, Artificial Sequence
  Description of Artificial Sequence:  Enzymatic Nucleic acid
ccaccaucggaggaaacucccuucaaggacaucguccgggcaguggcg

SEQ ID NO: 8349 - RNA, 48 nt, Artificial Sequence
  Description of Artificial Sequence:  Enzymatic Nucleic acid
cccaccauggaggaaacucccuucaaggacaucguccgggccaguggc

SEQ ID NO: 8350 - RNA, 48 nt, Artificial Sequence
  Description of Artificial Sequence:  Enzymatic Nucleic acid
gcccccacggaggaaacucccuucaaggacaucguccgggaucccagu

SEQ ID NO: 8351 - RNA, 48 nt, Artificial Sequence
  Description of Artificial Sequence:  Enzymatic Nucleic acid
ggcccccaggaggaaacucccuucaaggacaucguccgggcaucccag

SEQ ID NO: 8352 - RNA, 48 nt, Artificial Sequence
  Description of Artificial Sequence:  Enzymatic Nucleic acid
agggccccggaggaaacucccuucaaggacaucguccgggaccauccc

SEQ ID NO: 8353 - RNA, 48 nt, Artificial Sequence
  Description of Artificial Sequence:  Enzymatic Nucleic acid
gagggcccggaggaaacucccuucaaggacaucguccgggcaccaucc

SEQ ID NO: 8354 - RNA, 48 nt, Artificial Sequence
  Description of Artificial Sequence:  Enzymatic Nucleic acid
ggagggccggaggaaacucccuucaaggacaucguccgggccaccauc

SEQ ID NO: 8355 - RNA, 48 nt, Artificial Sequence
  Description of Artificial Sequence:  Enzymatic Nucleic acid
aggagggcggaggaaacucccuucaaggacaucguccgggcccaccau

SEQ ID NO: 8356 - RNA, 48 nt, Artificial Sequence
  Description of Artificial Sequence:  Enzymatic Nucleic acid
gaggagggggaggaaacucccuucaaggacaucguccgggccccacca

SEQ ID NO: 8357 - RNA, 48 nt, Artificial Sequence
  Description of Artificial Sequence:  Enzymatic Nucleic acid
accagcagggaggaaacucccuucaaggacaucguccgggaagaggag

SEQ ID NO: 8358 - RNA, 48 nt, Artificial Sequence
  Description of Artificial Sequence:  Enzymatic Nucleic acid
accaccagggaggaaacucccuucaaggacaucguccgggagcaagag

SEQ ID NO: 8359 - RNA, 48 nt, Artificial Sequence
  Description of Artificial Sequence:  Enzymatic Nucleic acid
gccaccacggaggaaacucccuucaaggacaucguccgggagcagcaa

SEQ ID NO: 8360 - RNA, 48 nt, Artificial Sequence
  Description of Artificial Sequence:  Enzymatic Nucleic acid
ggccaccaggaggaaacucccuucaaggacaucguccgggcagcagca

SEQ ID NO: 8361 - RNA, 48 nt, Artificial Sequence
  Description of Artificial Sequence:  Enzymatic Nucleic acid
agggccacggaggaaacucccuucaaggacaucguccgggaccagcag

SEQ ID NO: 8362 - RNA, 48 nt, Artificial Sequence
  Description of Artificial Sequence:  Enzymatic Nucleic acid
cagggccaggaggaaacucccuucaaggacaucguccgggcaccagca

SEQ ID NO: 8363 - RNA, 48 nt, Artificial Sequence
  Description of Artificial Sequence:  Enzymatic Nucleic acid
cccagggcggaggaaacucccuucaaggacaucguccgggaccaccag

SEQ ID NO: 8364 - RNA, 48 nt, Artificial Sequence
  Description of Artificial Sequence:  Enzymatic Nucleic acid
ccccagggggaggaaacucccuucaaggacaucguccgggcaccacca

SEQ ID NO: 8365 - RNA, 48 nt, Artificial Sequence
  Description of Artificial Sequence:  Enzymatic Nucleic acid
ccgaucccggaggaaacucccuucaaggacaucguccgggagggccac

SEQ ID NO: 8366 - RNA, 48 nt, Artificial Sequence
  Description of Artificial Sequence:  Enzymatic Nucleic acid
gccgauccggaggaaacucccuucaaggacaucguccgggcagggcca

SEQ ID NO: 8367 - RNA, 48 nt, Artificial Sequence
  Description of Artificial Sequence:  Enzymatic Nucleic acid
ggccgaucggaggaaacucccuucaaggacaucguccgggccagggcc

SEQ ID NO: 8368 - RNA, 48 nt, Artificial Sequence
  Description of Artificial Sequence:  Enzymatic Nucleic acid
aggccgauggaggaaacucccuucaaggacaucguccgggcccagggc

SEQ ID NO: 8369 - RNA, 48 nt, Artificial Sequence
  Description of Artificial Sequence:  Enzymatic Nucleic acid
gaagaggcggaggaaacucccuucaaggacaucguccggggaucccca

SEQ ID NO: 8370 - RNA, 48 nt, Artificial Sequence
  Description of Artificial Sequence:  Enzymatic Nucleic acid
ugaagaggggaggaaacucccuucaaggacaucguccgggcgaucccc

SEQ ID NO: 8371 - RNA, 48 nt, Artificial Sequence
  Description of Artificial Sequence:  Enzymatic Nucleic acid
cgccuucgggaggaaacucccuucaaggacaucguccgggaugaagag

SEQ ID NO: 8372 - RNA, 48 nt, Artificial Sequence
  Description of Artificial Sequence:  Enzymatic Nucleic acid
ggcgccuuggaggaaacucccuucaaggacaucguccggggcaugaag

SEQ ID NO: 8373 - RNA, 48 nt, Artificial Sequence
  Description of Artificial Sequence:  Enzymatic Nucleic acid
uguggcgcggaggaaacucccuucaaggacaucguccggguucgcaug

SEQ ID NO: 8374 - RNA, 48 nt, Artificial Sequence
  Description of Artificial Sequence:  Enzymatic Nucleic acid
auguggcgggaggaaacucccuucaaggacaucguccgggcuucgcau

SEQ ID NO: 8375 - RNA, 48 nt, Artificial Sequence
  Description of Artificial Sequence:  Enzymatic Nucleic acid
cgauguggggaggaaacucccuucaaggacaucguccggggccuucgc

SEQ ID NO: 8376 - RNA, 48 nt, Artificial Sequence
  Description of Artificial Sequence:  Enzymatic Nucleic acid
cuuccgaaggaggaaacucccuucaaggacaucguccggggauguggc

SEQ ID NO: 8377 - RNA, 48 nt, Artificial Sequence
  Description of Artificial Sequence:  Enzymatic Nucleic acid
ugcgcuucggaggaaacucccuucaaggacaucguccggggaacgaug

SEQ ID NO: 8378 - RNA, 48 nt, Artificial Sequence
  Description of Artificial Sequence:  Enzymatic Nucleic acid
gugcgcuuggaggaaacucccuucaaggacaucguccgggcgaacgau

SEQ ID NO: 8379 - RNA, 48 nt, Artificial Sequence
  Description of Artificial Sequence:  Enzymatic Nucleic acid
agcgugcgggaggaaacucccuucaaggacaucguccggguuccgaac

SEQ ID NO: 8380 - RNA, 48 nt, Artificial Sequence
  Description of Artificial Sequence:  Enzymatic Nucleic acid
gcagcgugggaggaaacucccuucaaggacaucguccggggcuuccga

SEQ ID NO: 8381 - RNA, 48 nt, Artificial Sequence
  Description of Artificial Sequence:  Enzymatic Nucleic acid
cuccgcagggaggaaacucccuucaaggacaucguccggggugcgcuu

SEQ ID NO: 8382 - RNA, 48 nt, Artificial Sequence
  Description of Artificial Sequence:  Enzymatic Nucleic acid
agccuccgggaggaaacucccuucaaggacaucguccgggagcgugcg

SEQ ID NO: 8383 - RNA, 48 nt, Artificial Sequence
  Description of Artificial Sequence:  Enzymatic Nucleic acid
gcagccucggaggaaacucccuucaaggacaucguccggggcagcgug

SEQ ID NO: 8384 - RNA, 48 nt, Artificial Sequence
  Description of Artificial Sequence:  Enzymatic Nucleic acid
agcagccuggaggaaacucccuucaaggacaucguccgggcgcagcgu

SEQ ID NO: 8385 - RNA, 48 nt, Artificial Sequence
  Description of Artificial Sequence:  Enzymatic Nucleic acid
gcagcagcggaggaaacucccuucaaggacaucguccggguccgcagc

SEQ ID NO: 8386 - RNA, 48 nt, Artificial Sequence
  Description of Artificial Sequence:  Enzymatic Nucleic acid
ugcagcagggaggaaacucccuucaaggacaucguccgggcuccgcag

SEQ ID NO: 8387 - RNA, 48 nt, Artificial Sequence
  Description of Artificial Sequence:  Enzymatic Nucleic acid
uccugcagggaggaaacucccuucaaggacaucguccgggagccuccg

SEQ ID NO: 8388 - RNA, 48 nt, Artificial Sequence
  Description of Artificial Sequence:  Enzymatic Nucleic acid
cucuccugggaggaaacucccuucaaggacaucguccgggagcagccu

SEQ ID NO: 8389 - RNA, 48 nt, Artificial Sequence
  Description of Artificial Sequence:  Enzymatic Nucleic acid
ucccucucggaggaaacucccuucaaggacaucguccgggugcagcag

SEQ ID NO: 8390 - RNA, 48 nt, Artificial Sequence
  Description of Artificial Sequence:  Enzymatic Nucleic acid
cucccucuggaggaaacucccuucaaggacaucguccgggcugcagca

SEQ ID NO: 8391 - RNA, 48 nt, Artificial Sequence
  Description of Artificial Sequence:  Enzymatic Nucleic acid
agcucccuggaggaaacucccuucaaggacaucguccggguccugcag

SEQ ID NO: 8392 - RNA, 48 nt, Artificial Sequence
  Description of Artificial Sequence:  Enzymatic Nucleic acid
caagcuccggaggaaacucccuucaaggacaucguccgggucuccugc

SEQ ID NO: 8393 - RNA, 48 nt, Artificial Sequence
  Description of Artificial Sequence:  Enzymatic Nucleic acid
acaagcucggaggaaacucccuucaaggacaucguccgggcucuccug

SEQ ID NO: 8394 - RNA, 48 nt, Artificial Sequence
  Description of Artificial Sequence:  Enzymatic Nucleic acid
cacaagcuggaggaaacucccuucaaggacaucguccgggccucuccu

SEQ ID NO: 8395 - RNA, 48 nt, Artificial Sequence
  Description of Artificial Sequence:  Enzymatic Nucleic acid
uccacaagggaggaaacucccuucaaggacaucguccgggucccucuc

SEQ ID NO: 8396 - RNA, 48 nt, Artificial Sequence
  Description of Artificial Sequence:  Enzymatic Nucleic acid
aggcuccaggaggaaacucccuucaaggacaucguccgggaagcuccc

SEQ ID NO: 8397 - RNA, 48 nt, Artificial Sequence
  Description of Artificial Sequence:  Enzymatic Nucleic acid
agaggcucggaggaaacucccuucaaggacaucguccgggacaagcuc

SEQ ID NO: 8398 - RNA, 48 nt, Artificial Sequence
  Description of Artificial Sequence:  Enzymatic Nucleic acid
aagaggcuggaggaaacucccuucaaggacaucguccgggcacaagcu

SEQ ID NO: 8399 - RNA, 48 nt, Artificial Sequence
  Description of Artificial Sequence:  Enzymatic Nucleic acid
guaagaggggaggaaacucccuucaaggacaucguccggguccacaag

SEQ ID NO: 8400 - RNA, 48 nt, Artificial Sequence
  Description of Artificial Sequence:  Enzymatic Nucleic acid
cuucuccaggaggaaacucccuucaaggacaucguccgggugggugua

SEQ ID NO: 8401 - RNA, 48 nt, Artificial Sequence
  Description of Artificial Sequence:  Enzymatic Nucleic acid
agcuucucggaggaaacucccuucaaggacaucguccgggacugggug

SEQ ID NO: 8402 - RNA, 48 nt, Artificial Sequence
  Description of Artificial Sequence:  Enzymatic Nucleic acid
gagcuucuggaggaaacucccuucaaggacaucguccgggcacugggu

SEQ ID NO: 8403 - RNA, 48 nt, Artificial Sequence
  Description of Artificial Sequence:  Enzymatic Nucleic acid
gggagcuuggaggaaacucccuucaaggacaucguccggguccacugg

SEQ ID NO: 8404 - RNA, 48 nt, Artificial Sequence
  Description of Artificial Sequence:  Enzymatic Nucleic acid
guugggagggaggaaacucccuucaaggacaucguccggguucuccac

SEQ ID NO: 8405 - RNA, 48 nt, Artificial Sequence
  Description of Artificial Sequence:  Enzymatic Nucleic acid
caagagagggaggaaacucccuucaaggacaucguccggguugguugg

SEQ ID NO: 8406 - RNA, 48 nt, Artificial Sequence
  Description of Artificial Sequence:  Enzymatic Nucleic acid
aagauccuggaggaaacucccuucaaggacaucguccgggaagagagc

SEQ ID NO: 8407 - RNA, 48 nt, Artificial Sequence
  Description of Artificial Sequence:  Enzymatic Nucleic acid
ucaagaucggaggaaacucccuucaaggacaucguccgggucaagaga

SEQ ID NO: 8408 - RNA, 48 nt, Artificial Sequence
  Description of Artificial Sequence:  Enzymatic Nucleic acid
uucaagauggaggaaacucccuucaaggacaucguccgggcucaagag

SEQ ID NO: 8409 - RNA, 48 nt, Artificial Sequence
  Description of Artificial Sequence:  Enzymatic Nucleic acid
guuuccuuggaggaaacucccuucaaggacaucguccgggaagauccu

SEQ ID NO: 8410 - RNA, 48 nt, Artificial Sequence
  Description of Artificial Sequence:  Enzymatic Nucleic acid
ucaguuucggaggaaacucccuucaaggacaucguccggguucaagau

SEQ ID NO: 8411 - RNA, 48 nt, Artificial Sequence
  Description of Artificial Sequence:  Enzymatic Nucleic acid
uucaguuuggaggaaacucccuucaaggacaucguccgggcuucaaga

SEQ ID NO: 8412 - RNA, 48 nt, Artificial Sequence
  Description of Artificial Sequence:  Enzymatic Nucleic acid
uuugaauuggaggaaacucccuucaaggacaucguccgggaguuuccu

SEQ ID NO: 8413 - RNA, 48 nt, Artificial Sequence
  Description of Artificial Sequence:  Enzymatic Nucleic acid
acuuugauggaggaaacucccuucaaggacaucguccggguuuuugaa

SEQ ID NO: 8414 - RNA, 48 nt, Artificial Sequence
  Description of Artificial Sequence:  Enzymatic Nucleic acid
gcccagcaggaggaaacucccuucaaggacaucguccggguuugaucu

SEQ ID NO: 8415 - RNA, 48 nt, Artificial Sequence
  Description of Artificial Sequence:  Enzymatic Nucleic acid
gagcccagggaggaaacucccuucaaggacaucguccgggacuuugau

SEQ ID NO: 8416 - RNA, 48 nt, Artificial Sequence
  Description of Artificial Sequence:  Enzymatic Nucleic acid
ccggagccggaggaaacucccuucaaggacaucguccgggagcacuuu

SEQ ID NO: 8417 - RNA, 48 nt, Artificial Sequence
  Description of Artificial Sequence:  Enzymatic Nucleic acid
accggagcggaggaaacucccuucaaggacaucguccgggcagcacuu

SEQ ID NO: 8418 - RNA, 48 nt, Artificial Sequence
  Description of Artificial Sequence:  Enzymatic Nucleic acid
caccggagggaggaaacucccuucaaggacaucguccgggccagcacu

SEQ ID NO: 8419 - RNA, 48 nt, Artificial Sequence
  Description of Artificial Sequence:  Enzymatic Nucleic acid
gaacgcacggaggaaacucccuucaaggacaucguccgggggagccca

SEQ ID NO: 8420 - RNA, 48 nt, Artificial Sequence
  Description of Artificial Sequence:  Enzymatic Nucleic acid
cgaacgcaggaggaaacucccuucaaggacaucguccgggcggagccc

SEQ ID NO: 8421 - RNA, 48 nt, Artificial Sequence
  Description of Artificial Sequence:  Enzymatic Nucleic acid
gccgaacgggaggaaacucccuucaaggacaucguccgggaccggagc

SEQ ID NO: 8422 - RNA, 48 nt, Artificial Sequence
  Description of Artificial Sequence:  Enzymatic Nucleic acid
gugccgaaggaggaaacucccuucaaggacaucguccggggcaccgga

SEQ ID NO: 8423 - RNA, 48 nt, Artificial Sequence
  Description of Artificial Sequence:  Enzymatic Nucleic acid
caccgugcggaggaaacucccuucaaggacaucguccggggaacgcac

SEQ ID NO: 8424 - RNA, 48 nt, Artificial Sequence
  Description of Artificial Sequence:  Enzymatic Nucleic acid
acaccgugggaggaaacucccuucaaggacaucguccgggcgaacgca

SEQ ID NO: 8425 - RNA, 48 nt, Artificial Sequence
  Description of Artificial Sequence:  Enzymatic Nucleic acid
uuauacacggaggaaacucccuucaaggacaucguccggggugccgaa

SEQ ID NO: 8426 - RNA, 48 nt, Artificial Sequence
  Description of Artificial Sequence:  Enzymatic Nucleic acid
cuuauacaggaggaaacucccuucaaggacaucguccgggcgugccga

SEQ ID NO: 8427 - RNA, 48 nt, Artificial Sequence
  Description of Artificial Sequence:  Enzymatic Nucleic acid
cccuuauaggaggaaacucccuucaaggacaucguccgggaccgugcc

SEQ ID NO: 8428 - RNA, 48 nt, Artificial Sequence
  Description of Artificial Sequence:  Enzymatic Nucleic acid
cagaguccggaggaaacucccuucaaggacaucguccggguuauacac

SEQ ID NO: 8429 - RNA, 48 nt, Artificial Sequence
  Description of Artificial Sequence:  Enzymatic Nucleic acid
ccagagucggaggaaacucccuucaaggacaucguccgggcuuauaca

SEQ ID NO: 8430 - RNA, 48 nt, Artificial Sequence
  Description of Artificial Sequence:  Enzymatic Nucleic acid
uccagaguggaggaaacucccuucaaggacaucguccgggccuuauac

SEQ ID NO: 8431 - RNA, 48 nt, Artificial Sequence
  Description of Artificial Sequence:  Enzymatic Nucleic acid
cugggaucggaggaaacucccuucaaggacaucguccgggagaguccc

SEQ ID NO: 8432 - RNA, 48 nt, Artificial Sequence
  Description of Artificial Sequence:  Enzymatic Nucleic acid
ucugggauggaggaaacucccuucaaggacaucguccgggcagagucc

SEQ ID NO: 8433 - RNA, 48 nt, Artificial Sequence
  Description of Artificial Sequence:  Enzymatic Nucleic acid
cucaccuuggaggaaacucccuucaaggacaucguccgggugggaucc

SEQ ID NO: 8434 - RNA, 48 nt, Artificial Sequence
  Description of Artificial Sequence:  Enzymatic Nucleic acid
uuucucacggaggaaacucccuucaaggacaucguccggguucuggga

SEQ ID NO: 8435 - RNA, 48 nt, Artificial Sequence
  Description of Artificial Sequence:  Enzymatic Nucleic acid
cuuucucaggaggaaacucccuucaaggacaucguccgggcuucuggg

SEQ ID NO: 8436 - RNA, 48 nt, Artificial Sequence
  Description of Artificial Sequence:  Enzymatic Nucleic acid
aacuuucuggaggaaacucccuucaaggacaucguccgggaccuucug

SEQ ID NO: 8437 - RNA, 48 nt, Artificial Sequence
  Description of Artificial Sequence:  Enzymatic Nucleic acid
uuaacuuuggaggaaacucccuucaaggacaucguccgggucaccuuc

SEQ ID NO: 8438 - RNA, 48 nt, Artificial Sequence
  Description of Artificial Sequence:  Enzymatic Nucleic acid
aauuuuaaggaggaaacucccuucaaggacaucguccggguuucucac

SEQ ID NO: 8439 - RNA, 48 nt, Artificial Sequence
  Description of Artificial Sequence:  Enzymatic Nucleic acid
gauagcgaggaggaaacucccuucaaggacaucguccggggggaauuu

SEQ ID NO: 8440 - RNA, 48 nt, Artificial Sequence
  Description of Artificial Sequence:  Enzymatic Nucleic acid
cuugauagggaggaaacucccuucaaggacaucguccggggacgggaa

SEQ ID NO: 8441 - RNA, 48 nt, Artificial Sequence
  Description of Artificial Sequence:  Enzymatic Nucleic acid
cuuaauucggaggaaacucccuucaaggacaucguccggguugauagc

SEQ ID NO: 8442 - RNA, 48 nt, Artificial Sequence
  Description of Artificial Sequence:  Enzymatic Nucleic acid
ucuuaauuggaggaaacucccuucaaggacaucguccgggcuugauag

SEQ ID NO: 8443 - RNA, 48 nt, Artificial Sequence
  Description of Artificial Sequence:  Enzymatic Nucleic acid
uugcuucuggaggaaacucccuucaaggacaucguccggguuaauucc

SEQ ID NO: 8444 - RNA, 48 nt, Artificial Sequence
  Description of Artificial Sequence:  Enzymatic Nucleic acid
uguugcuuggaggaaacucccuucaaggacaucguccgggucuuaauu

SEQ ID NO: 8445 - RNA, 48 nt, Artificial Sequence
  Description of Artificial Sequence:  Enzymatic Nucleic acid
agauguugggaggaaacucccuucaaggacaucguccggguucucuua

SEQ ID NO: 8446 - RNA, 48 nt, Artificial Sequence
  Description of Artificial Sequence:  Enzymatic Nucleic acid
uuggcuuuggaggaaacucccuucaaggacaucguccgggggagaugu

SEQ ID NO: 8447 - RNA, 48 nt, Artificial Sequence
  Description of Artificial Sequence:  Enzymatic Nucleic acid
cuuguuggggaggaaacucccuucaaggacaucguccggguuucggag

SEQ ID NO: 8448 - RNA, 48 nt, Artificial Sequence
  Description of Artificial Sequence:  Enzymatic Nucleic acid
aggauuucggaggaaacucccuucaaggacaucguccggguuguuggc

SEQ ID NO: 8449 - RNA, 48 nt, Artificial Sequence
  Description of Artificial Sequence:  Enzymatic Nucleic acid
gaggauuuggaggaaacucccuucaaggacaucguccgggcuuguugg

SEQ ID NO: 8450 - RNA, 48 nt, Artificial Sequence
  Description of Artificial Sequence:  Enzymatic Nucleic acid
ggcuucauggaggaaacucccuucaaggacaucguccggggaggauuu

SEQ ID NO: 8451 - RNA, 48 nt, Artificial Sequence
  Description of Artificial Sequence:  Enzymatic Nucleic acid
guaggcuuggaggaaacucccuucaaggacaucguccgggaucgagga

SEQ ID NO: 8452 - RNA, 48 nt, Artificial Sequence
  Description of Artificial Sequence:  Enzymatic Nucleic acid
cacguaggggaggaaacucccuucaaggacaucguccggguucaucga

SEQ ID NO: 8453 - RNA, 48 nt, Artificial Sequence
  Description of Artificial Sequence:  Enzymatic Nucleic acid
ggccaucaggaggaaacucccuucaaggacaucguccgggguaggcuu

SEQ ID NO: 8454 - RNA, 48 nt, Artificial Sequence
  Description of Artificial Sequence:  Enzymatic Nucleic acid
cuggccauggaggaaacucccuucaaggacaucguccgggacguaggc

SEQ ID NO: 8455 - RNA, 48 nt, Artificial Sequence
  Description of Artificial Sequence:  Enzymatic Nucleic acid
acgcuggcggaggaaacucccuucaaggacaucguccgggaucacgua

SEQ ID NO: 8456 - RNA, 48 nt, Artificial Sequence
  Description of Artificial Sequence:  Enzymatic Nucleic acid
cacgcuggggaggaaacucccuucaaggacaucguccgggcaucacgu

SEQ ID NO: 8457 - RNA, 48 nt, Artificial Sequence
  Description of Artificial Sequence:  Enzymatic Nucleic acid
uguccacgggaggaaacucccuucaaggacaucguccggguggccauc

SEQ ID NO: 8458 - RNA, 48 nt, Artificial Sequence
  Description of Artificial Sequence:  Enzymatic Nucleic acid
guuguccaggaggaaacucccuucaaggacaucguccggggcuggcca

SEQ ID NO: 8459 - RNA, 48 nt, Artificial Sequence
  Description of Artificial Sequence:  Enzymatic Nucleic acid
ggguugucggaggaaacucccuucaaggacaucguccgggacgcuggc

SEQ ID NO: 8460 - RNA, 48 nt, Artificial Sequence
  Description of Artificial Sequence:  Enzymatic Nucleic acid
gggguuguggaggaaacucccuucaaggacaucguccgggcacgcugg

SEQ ID NO: 8461 - RNA, 48 nt, Artificial Sequence
  Description of Artificial Sequence:  Enzymatic Nucleic acid
gcggcacaggaggaaacucccuucaaggacaucguccggggugggggu

SEQ ID NO: 8462 - RNA, 48 nt, Artificial Sequence
  Description of Artificial Sequence:  Enzymatic Nucleic acid
aggcggcaggaggaaacucccuucaaggacaucguccgggacgugggg

SEQ ID NO: 8463 - RNA, 48 nt, Artificial Sequence
  Description of Artificial Sequence:  Enzymatic Nucleic acid
gcaggcggggaggaaacucccuucaaggacaucguccgggacacgugg

SEQ ID NO: 8464 - RNA, 48 nt, Artificial Sequence
  Description of Artificial Sequence:  Enzymatic Nucleic acid
ccagcaggggaggaaacucccuucaaggacaucguccgggggcacacg

SEQ ID NO: 8465 - RNA, 48 nt, Artificial Sequence
  Description of Artificial Sequence:  Enzymatic Nucleic acid
augcccagggaggaaacucccuucaaggacaucguccgggaggcggca

SEQ ID NO: 8466 - RNA, 48 nt, Artificial Sequence
  Description of Artificial Sequence:  Enzymatic Nucleic acid
cagaugccggaggaaacucccuucaaggacaucguccgggagcaggcg

SEQ ID NO: 8467 - RNA, 48 nt, Artificial Sequence
  Description of Artificial Sequence:  Enzymatic Nucleic acid
gcagaugcggaggaaacucccuucaaggacaucguccgggcagcaggc

SEQ ID NO: 8468 - RNA, 48 nt, Artificial Sequence
  Description of Artificial Sequence:  Enzymatic Nucleic acid
ggcagaugggaggaaacucccuucaaggacaucguccgggccagcagg

SEQ ID NO: 8469 - RNA, 48 nt, Artificial Sequence
  Description of Artificial Sequence:  Enzymatic Nucleic acid
aggugaggggaggaaacucccuucaaggacaucguccgggagaugccc

SEQ ID NO: 8470 - RNA, 48 nt, Artificial Sequence
  Description of Artificial Sequence:  Enzymatic Nucleic acid
gaguugcaggaggaaacucccuucaaggacaucguccggggguggagg

SEQ ID NO: 8471 - RNA, 48 nt, Artificial Sequence
  Description of Artificial Sequence:  Enzymatic Nucleic acid
augaguugggaggaaacucccuucaaggacaucguccgggacggugga

SEQ ID NO: 8472 - RNA, 48 nt, Artificial Sequence
  Description of Artificial Sequence:  Enzymatic Nucleic acid
augagcugggaggaaacucccuucaaggacaucguccggggugaugag

SEQ ID NO: 8473 - RNA, 48 nt, Artificial Sequence
  Description of Artificial Sequence:  Enzymatic Nucleic acid
ggcaugagggaggaaacucccuucaaggacaucguccgggugcgugau

SEQ ID NO: 8474 - RNA, 48 nt, Artificial Sequence
  Description of Artificial Sequence:  Enzymatic Nucleic acid
ccgaagggggaggaaacucccuucaaggacaucguccgggaugagcug

SEQ ID NO: 8475 - RNA, 48 nt, Artificial Sequence
  Description of Artificial Sequence:  Enzymatic Nucleic acid
gaggcagcggaggaaacucccuucaaggacaucguccggggaagggca

SEQ ID NO: 8476 - RNA, 48 nt, Artificial Sequence
  Description of Artificial Sequence:  Enzymatic Nucleic acid
ggaggcagggaggaaacucccuucaaggacaucguccgggcgaagggc

SEQ ID NO: 8477 - RNA, 48 nt, Artificial Sequence
  Description of Artificial Sequence:  Enzymatic Nucleic acid
ccaggaggggaggaaacucccuucaaggacaucguccgggagccgaag

SEQ ID NO: 8478 - RNA, 48 nt, Artificial Sequence
  Description of Artificial Sequence:  Enzymatic Nucleic acid
acauagucggaggaaacucccuucaaggacaucguccgggaggaggca

SEQ ID NO: 8479 - RNA, 48 nt, Artificial Sequence
  Description of Artificial Sequence:  Enzymatic Nucleic acid
gacauaguggaggaaacucccuucaaggacaucguccgggcaggaggc

SEQ ID NO: 8480 - RNA, 48 nt, Artificial Sequence
  Description of Artificial Sequence:  Enzymatic Nucleic acid
uucccggaggaggaaacucccuucaaggacaucguccgggauagucca

SEQ ID NO: 8481 - RNA, 48 nt, Artificial Sequence
  Description of Artificial Sequence:  Enzymatic Nucleic acid
uguguuccggaggaaacucccuucaaggacaucguccgggggacauag

SEQ ID NO: 8482 - RNA, 48 nt, Artificial Sequence
  Description of Artificial Sequence:  Enzymatic Nucleic acid
uuguguucggaggaaacucccuucaaggacaucguccgggcggacaua

SEQ ID NO: 8483 - RNA, 48 nt, Artificial Sequence
  Description of Artificial Sequence:  Enzymatic Nucleic acid
uuuguguuggaggaaacucccuucaaggacaucguccgggccggacau

SEQ ID NO: 8484 - RNA, 48 nt, Artificial Sequence
  Description of Artificial Sequence:  Enzymatic Nucleic acid
aauauuguggaggaaacucccuucaaggacaucguccggguuuguguu

SEQ ID NO: 8485 - RNA, 48 nt, Artificial Sequence
  Description of Artificial Sequence:  Enzymatic Nucleic acid
cugggagcggaggaaacucccuucaaggacaucguccgggaauauugu

SEQ ID NO: 8486 - RNA, 48 nt, Artificial Sequence
  Description of Artificial Sequence:  Enzymatic Nucleic acid
acugggagggaggaaacucccuucaaggacaucguccgggcaauauug

SEQ ID NO: 8487 - RNA, 48 nt, Artificial Sequence
  Description of Artificial Sequence:  Enzymatic Nucleic acid
agcagguaggaggaaacucccuucaaggacaucguccgggugggagcc

SEQ ID NO: 8488 - RNA, 48 nt, Artificial Sequence
  Description of Artificial Sequence:  Enzymatic Nucleic acid
caguugagggaggaaacucccuucaaggacaucguccgggagguacug

SEQ ID NO: 8489 - RNA, 48 nt, Artificial Sequence
  Description of Artificial Sequence:  Enzymatic Nucleic acid
gcacacacggaggaaacucccuucaaggacaucguccgggaguugagc

SEQ ID NO: 8490 - RNA, 48 nt, Artificial Sequence
  Description of Artificial Sequence:  Enzymatic Nucleic acid
ugcacacaggaggaaacucccuucaaggacaucguccgggcaguugag

SEQ ID NO: 8491 - RNA, 48 nt, Artificial Sequence
  Description of Artificial Sequence:  Enzymatic Nucleic acid
ucugcacaggaggaaacucccuucaaggacaucguccgggaccaguug

SEQ ID NO: 8492 - RNA, 48 nt, Artificial Sequence
  Description of Artificial Sequence:  Enzymatic Nucleic acid
gaucugcaggaggaaacucccuucaaggacaucguccgggacaccagu

SEQ ID NO: 8493 - RNA, 48 nt, Artificial Sequence
  Description of Artificial Sequence:  Enzymatic Nucleic acid
gcgaucugggaggaaacucccuucaaggacaucguccgggacacacca

SEQ ID NO: 8494 - RNA, 48 nt, Artificial Sequence
  Description of Artificial Sequence:  Enzymatic Nucleic acid
uuugcgauggaggaaacucccuucaaggacaucguccgggugcacaca

SEQ ID NO: 8495 - RNA, 48 nt, Artificial Sequence
  Description of Artificial Sequence:  Enzymatic Nucleic acid
gcccuuugggaggaaacucccuucaaggacaucguccggggaucugca

SEQ ID NO: 8496 - RNA, 48 nt, Artificial Sequence
  Description of Artificial Sequence:  Enzymatic Nucleic acid
uucaugccggaggaaacucccuucaaggacaucguccggguuugcgau

SEQ ID NO: 8497 - RNA, 48 nt, Artificial Sequence
  Description of Artificial Sequence:  Enzymatic Nucleic acid
guucaugcggaggaaacucccuucaaggacaucguccgggcuuugcga

SEQ ID NO: 8498 - RNA, 48 nt, Artificial Sequence
  Description of Artificial Sequence:  Enzymatic Nucleic acid
aguucaugggaggaaacucccuucaaggacaucguccgggccuuugcg

SEQ ID NO: 8499 - RNA, 48 nt, Artificial Sequence
  Description of Artificial Sequence:  Enzymatic Nucleic acid
aaguaguuggaggaaacucccuucaaggacaucguccgggaugcccuu

SEQ ID NO: 8500 - RNA, 48 nt, Artificial Sequence
  Description of Artificial Sequence:  Enzymatic Nucleic acid
cgguccucggaggaaacucccuucaaggacaucguccgggaaguaguu

SEQ ID NO: 8501 - RNA, 48 nt, Artificial Sequence
  Description of Artificial Sequence:  Enzymatic Nucleic acid
acgguccuggaggaaacucccuucaaggacaucguccgggcaaguagu

SEQ ID NO: 8502 - RNA, 48 nt, Artificial Sequence
  Description of Artificial Sequence:  Enzymatic Nucleic acid
cgacggucggaggaaacucccuucaaggacaucguccggguccaagua

SEQ ID NO: 8503 - RNA, 48 nt, Artificial Sequence
  Description of Artificial Sequence:  Enzymatic Nucleic acid
gcgacgguggaggaaacucccuucaaggacaucguccgggcuccaagu

SEQ ID NO: 8504 - RNA, 48 nt, Artificial Sequence
  Description of Artificial Sequence:  Enzymatic Nucleic acid
ccaagcgaggaggaaacucccuucaaggacaucguccggggguccucc

SEQ ID NO: 8505 - RNA, 48 nt, Artificial Sequence
  Description of Artificial Sequence:  Enzymatic Nucleic acid
gcaccaagggaggaaacucccuucaaggacaucguccggggacggucc

SEQ ID NO: 8506 - RNA, 48 nt, Artificial Sequence
  Description of Artificial Sequence:  Enzymatic Nucleic acid
cggugcacggaggaaacucccuucaaggacaucguccgggaagcgacg

SEQ ID NO: 8507 - RNA, 48 nt, Artificial Sequence
  Description of Artificial Sequence:  Enzymatic Nucleic acid
gcggugcaggaggaaacucccuucaaggacaucguccgggcaagcgac

SEQ ID NO: 8508 - RNA, 48 nt, Artificial Sequence
  Description of Artificial Sequence:  Enzymatic Nucleic acid
ucgcggugggaggaaacucccuucaaggacaucguccgggaccaagcg

SEQ ID NO: 8509 - RNA, 48 nt, Artificial Sequence
  Description of Artificial Sequence:  Enzymatic Nucleic acid
ccaggucgggaggaaacucccuucaaggacaucguccgggggugcacc

SEQ ID NO: 8510 - RNA, 48 nt, Artificial Sequence
  Description of Artificial Sequence:  Enzymatic Nucleic acid
ugccagguggaggaaacucccuucaaggacaucguccggggcggugca

SEQ ID NO: 8511 - RNA, 48 nt, Artificial Sequence
  Description of Artificial Sequence:  Enzymatic Nucleic acid
cuggcugcggaggaaacucccuucaaggacaucguccgggaggucgcg

SEQ ID NO: 8512 - RNA, 48 nt, Artificial Sequence
  Description of Artificial Sequence:  Enzymatic Nucleic acid
ccuggcugggaggaaacucccuucaaggacaucguccgggcaggucgc

SEQ ID NO: 8513 - RNA, 48 nt, Artificial Sequence
  Description of Artificial Sequence:  Enzymatic Nucleic acid
guuccuggggaggaaacucccuucaaggacaucguccgggugccaggu

SEQ ID NO: 8514 - RNA, 48 nt, Artificial Sequence
  Description of Artificial Sequence:  Enzymatic Nucleic acid
guacguucggaggaaacucccuucaaggacaucguccggguggcugcc

SEQ ID NO: 8515 - RNA, 48 nt, Artificial Sequence
  Description of Artificial Sequence:  Enzymatic Nucleic acid
aguacguuggaggaaacucccuucaaggacaucguccgggcuggcugc

SEQ ID NO: 8516 - RNA, 48 nt, Artificial Sequence
  Description of Artificial Sequence:  Enzymatic Nucleic acid
caccaguaggaggaaacucccuucaaggacaucguccgggguuccugg

SEQ ID NO: 8517 - RNA, 48 nt, Artificial Sequence
  Description of Artificial Sequence:  Enzymatic Nucleic acid
guuuucacggaggaaacucccuucaaggacaucguccgggaguacguu

SEQ ID NO: 8518 - RNA, 48 nt, Artificial Sequence
  Description of Artificial Sequence:  Enzymatic Nucleic acid
uguuuucaggaggaaacucccuucaaggacaucguccgggcaguacgu

SEQ ID NO: 8519 - RNA, 48 nt, Artificial Sequence
  Description of Artificial Sequence:  Enzymatic Nucleic acid
gguguuuuggaggaaacucccuucaaggacaucguccgggaccaguac

SEQ ID NO: 8520 - RNA, 48 nt, Artificial Sequence
  Description of Artificial Sequence:  Enzymatic Nucleic acid
acaugcugggaggaaacucccuucaaggacaucguccggggguguuuu

SEQ ID NO: 8521 - RNA, 48 nt, Artificial Sequence
  Description of Artificial Sequence:  Enzymatic Nucleic acid
uugacaugggaggaaacucccuucaaggacaucguccgggugcggugu

SEQ ID NO: 8522 - RNA, 48 nt, Artificial Sequence
  Description of Artificial Sequence:  Enzymatic Nucleic acid
gaucuugaggaggaaacucccuucaaggacaucguccgggaugcugcg

SEQ ID NO: 8523 - RNA, 48 nt, Artificial Sequence
  Description of Artificial Sequence:  Enzymatic Nucleic acid
ucugugauggaggaaacucccuucaaggacaucguccggguugacaug

SEQ ID NO: 8524 - RNA, 48 nt, Artificial Sequence
  Description of Artificial Sequence:  Enzymatic Nucleic acid
cccaaaauggaggaaacucccuucaaggacaucguccgggugugaucu

SEQ ID NO: 8525 - RNA, 48 nt, Artificial Sequence
  Description of Artificial Sequence:  Enzymatic Nucleic acid
ggccagccggaggaaacucccuucaaggacaucguccgggaaaaucug

SEQ ID NO: 8526 - RNA, 48 nt, Artificial Sequence
  Description of Artificial Sequence:  Enzymatic Nucleic acid
uggccagcggaggaaacucccuucaaggacaucguccgggcaaaaucu

SEQ ID NO: 8527 - RNA, 48 nt, Artificial Sequence
  Description of Artificial Sequence:  Enzymatic Nucleic acid
uuggccagggaggaaacucccuucaaggacaucguccgggccaaaauc

SEQ ID NO: 8528 - RNA, 48 nt, Artificial Sequence
  Description of Artificial Sequence:  Enzymatic Nucleic acid
aguuuggcggaggaaacucccuucaaggacaucguccgggagcccaaa

SEQ ID NO: 8529 - RNA, 48 nt, Artificial Sequence
  Description of Artificial Sequence:  Enzymatic Nucleic acid
caguuuggggaggaaacucccuucaaggacaucguccgggcagcccaa

SEQ ID NO: 8530 - RNA, 48 nt, Artificial Sequence
  Description of Artificial Sequence:  Enzymatic Nucleic acid
gcacccagggaggaaacucccuucaaggacaucguccgggaguuuggc

SEQ ID NO: 8531 - RNA, 48 nt, Artificial Sequence
  Description of Artificial Sequence:  Enzymatic Nucleic acid
uccgcaccggaggaaacucccuucaaggacaucguccgggagcaguuu

SEQ ID NO: 8532 - RNA, 48 nt, Artificial Sequence
  Description of Artificial Sequence:  Enzymatic Nucleic acid
uuccgcacggaggaaacucccuucaaggacaucguccgggcagcaguu

SEQ ID NO: 8533 - RNA, 48 nt, Artificial Sequence
  Description of Artificial Sequence:  Enzymatic Nucleic acid
cuuccgcaggaggaaacucccuucaaggacaucguccgggccagcagu

SEQ ID NO: 8534 - RNA, 48 nt, Artificial Sequence
  Description of Artificial Sequence:  Enzymatic Nucleic acid
cucuuccgggaggaaacucccuucaaggacaucguccgggacccagca

SEQ ID NO: 8535 - RNA, 48 nt, Artificial Sequence
  Description of Artificial Sequence:  Enzymatic Nucleic acid
uucucuucggaggaaacucccuucaaggacaucguccggggcacccag

SEQ ID NO: 8536 - RNA, 48 nt, Artificial Sequence
  Description of Artificial Sequence:  Enzymatic Nucleic acid
uuucucuuggaggaaacucccuucaaggacaucguccgggcgcaccca

SEQ ID NO: 8537 - RNA, 48 nt, Artificial Sequence
  Description of Artificial Sequence:  Enzymatic Nucleic acid
uucuuucuggaggaaacucccuucaaggacaucguccggguuccgcac

SEQ ID NO: 8538 - RNA, 48 nt, Artificial Sequence
  Description of Artificial Sequence:  Enzymatic Nucleic acid
uauucuuuggaggaaacucccuucaaggacaucguccgggucuuccgc

SEQ ID NO: 8539 - RNA, 48 nt, Artificial Sequence
  Description of Artificial Sequence:  Enzymatic Nucleic acid
augguauuggaggaaacucccuucaaggacaucguccggguuucucuu

SEQ ID NO: 8540 - RNA, 48 nt, Artificial Sequence
  Description of Artificial Sequence:  Enzymatic Nucleic acid
uccuucugggaggaaacucccuucaaggacaucguccgggaugguauu

SEQ ID NO: 8541 - RNA, 48 nt, Artificial Sequence
  Description of Artificial Sequence:  Enzymatic Nucleic acid
gccuccuuggaggaaacucccuucaaggacaucguccgggugcauggu

SEQ ID NO: 8542 - RNA, 48 nt, Artificial Sequence
  Description of Artificial Sequence:  Enzymatic Nucleic acid
uuugccucggaggaaacucccuucaaggacaucguccggguucugcau

SEQ ID NO: 8543 - RNA, 48 nt, Artificial Sequence
  Description of Artificial Sequence:  Enzymatic Nucleic acid
cuuugccuggaggaaacucccuucaaggacaucguccgggcuucugca

SEQ ID NO: 8544 - RNA, 48 nt, Artificial Sequence
  Description of Artificial Sequence:  Enzymatic Nucleic acid
cacuuugcggaggaaacucccuucaaggacaucguccggguccuucug

SEQ ID NO: 8545 - RNA, 48 nt, Artificial Sequence
  Description of Artificial Sequence:  Enzymatic Nucleic acid
gcacuuugggaggaaacucccuucaaggacaucguccgggcuccuucu

SEQ ID NO: 8546 - RNA, 48 nt, Artificial Sequence
  Description of Artificial Sequence:  Enzymatic Nucleic acid
gauaggcaggaggaaacucccuucaaggacaucguccggguuugccuc

SEQ ID NO: 8547 - RNA, 48 nt, Artificial Sequence
  Description of Artificial Sequence:  Enzymatic Nucleic acid
uugauaggggaggaaacucccuucaaggacaucguccgggacuuugcc

SEQ ID NO: 8548 - RNA, 48 nt, Artificial Sequence
  Description of Artificial Sequence:  Enzymatic Nucleic acid
gccauccaggaggaaacucccuucaaggacaucguccggguugauagg

SEQ ID NO: 8549 - RNA, 48 nt, Artificial Sequence
  Description of Artificial Sequence:  Enzymatic Nucleic acid
augccaucggaggaaacucccuucaaggacaucguccgggacuugaua

SEQ ID NO: 8550 - RNA, 48 nt, Artificial Sequence
  Description of Artificial Sequence:  Enzymatic Nucleic acid
aaugccauggaggaaacucccuucaaggacaucguccgggcacuugau

SEQ ID NO: 8551 - RNA, 48 nt, Artificial Sequence
  Description of Artificial Sequence:  Enzymatic Nucleic acid
uccaaugcggaggaaacucccuucaaggacaucguccgggauccacuu

SEQ ID NO: 8552 - RNA, 48 nt, Artificial Sequence
  Description of Artificial Sequence:  Enzymatic Nucleic acid
uuccaaugggaggaaacucccuucaaggacaucguccgggcauccacu

SEQ ID NO: 8553 - RNA, 48 nt, Artificial Sequence
  Description of Artificial Sequence:  Enzymatic Nucleic acid
auugauucggaggaaacucccuucaaggacaucguccgggaaugccau

SEQ ID NO: 8554 - RNA, 48 nt, Artificial Sequence
  Description of Artificial Sequence:  Enzymatic Nucleic acid
aauugauuggaggaaacucccuucaaggacaucguccgggcaaugcca

SEQ ID NO: 8555 - RNA, 48 nt, Artificial Sequence
  Description of Artificial Sequence:  Enzymatic Nucleic acid
uauagauuggaggaaacucccuucaaggacaucguccggguguguaaa

SEQ ID NO: 8556 - RNA, 48 nt, Artificial Sequence
  Description of Artificial Sequence:  Enzymatic Nucleic acid
acaucacuggaggaaacucccuucaaggacaucguccggguggugggu

SEQ ID NO: 8557 - RNA, 48 nt, Artificial Sequence
  Description of Artificial Sequence:  Enzymatic Nucleic acid
agacaucaggaggaaacucccuucaaggacaucguccgggucuggugg

SEQ ID NO: 8558 - RNA, 48 nt, Artificial Sequence
  Description of Artificial Sequence:  Enzymatic Nucleic acid
ccagacauggaggaaacucccuucaaggacaucguccgggacucuggu

SEQ ID NO: 8559 - RNA, 48 nt, Artificial Sequence
  Description of Artificial Sequence:  Enzymatic Nucleic acid
gcuccagaggaggaaacucccuucaaggacaucguccgggaucacucu

SEQ ID NO: 8560 - RNA, 48 nt, Artificial Sequence
  Description of Artificial Sequence:  Enzymatic Nucleic acid
cguagcucggaggaaacucccuucaaggacaucguccgggagacauca

SEQ ID NO: 8561 - RNA, 48 nt, Artificial Sequence
  Description of Artificial Sequence:  Enzymatic Nucleic acid
ccguagcuggaggaaacucccuucaaggacaucguccgggcagacauc

SEQ ID NO: 8562 - RNA, 48 nt, Artificial Sequence
  Description of Artificial Sequence:  Enzymatic Nucleic acid
ccccguagggaggaaacucccuucaaggacaucguccggguccagaca

SEQ ID NO: 8563 - RNA, 48 nt, Artificial Sequence
  Description of Artificial Sequence:  Enzymatic Nucleic acid
ggucacccggaggaaacucccuucaaggacaucguccgggguagcucc

SEQ ID NO: 8564 - RNA, 48 nt, Artificial Sequence
  Description of Artificial Sequence:  Enzymatic Nucleic acid
cggucaccggaggaaacucccuucaaggacaucguccgggcguagcuc

SEQ ID NO: 8565 - RNA, 48 nt, Artificial Sequence
  Description of Artificial Sequence:  Enzymatic Nucleic acid
acggucacggaggaaacucccuucaaggacaucguccgggccguagcu

SEQ ID NO: 8566 - RNA, 48 nt, Artificial Sequence
  Description of Artificial Sequence:  Enzymatic Nucleic acid
aacggucaggaggaaacucccuucaaggacaucguccgggcccguagc

SEQ ID NO: 8567 - RNA, 48 nt, Artificial Sequence
  Description of Artificial Sequence:  Enzymatic Nucleic acid
caaacgguggaggaaacucccuucaaggacaucguccgggaccccgua

SEQ ID NO: 8568 - RNA, 48 nt, Artificial Sequence
  Description of Artificial Sequence:  Enzymatic Nucleic acid
cucccaaaggaggaaacucccuucaaggacaucguccgggggucaccc

SEQ ID NO: 8569 - RNA, 48 nt, Artificial Sequence
  Description of Artificial Sequence:  Enzymatic Nucleic acid
ucaacuccggaggaaacucccuucaaggacaucguccgggaaacgguc

SEQ ID NO: 8570 - RNA, 48 nt, Artificial Sequence
  Description of Artificial Sequence:  Enzymatic Nucleic acid
aucaacucggaggaaacucccuucaaggacaucguccgggcaaacggu

SEQ ID NO: 8571 - RNA, 48 nt, Artificial Sequence
  Description of Artificial Sequence:  Enzymatic Nucleic acid
caucaacuggaggaaacucccuucaaggacaucguccgggccaaacgg

SEQ ID NO: 8572 - RNA, 48 nt, Artificial Sequence
  Description of Artificial Sequence:  Enzymatic Nucleic acid
gucaucaaggaggaaacucccuucaaggacaucguccgggucccaaac

SEQ ID NO: 8573 - RNA, 48 nt, Artificial Sequence
  Description of Artificial Sequence:  Enzymatic Nucleic acid
aaggucauggaggaaacucccuucaaggacaucguccgggaacuccca

SEQ ID NO: 8574 - RNA, 48 nt, Artificial Sequence
  Description of Artificial Sequence:  Enzymatic Nucleic acid
ccaaagguggaggaaacucccuucaaggacaucguccgggaucaacuc

SEQ ID NO: 8575 - RNA, 48 nt, Artificial Sequence
  Description of Artificial Sequence:  Enzymatic Nucleic acid
cuuggaucggaggaaacucccuucaaggacaucguccgggaaagguca

SEQ ID NO: 8576 - RNA, 48 nt, Artificial Sequence
  Description of Artificial Sequence:  Enzymatic Nucleic acid
gcuuggauggaggaaacucccuucaaggacaucguccgggcaaagguc

SEQ ID NO: 8577 - RNA, 48 nt, Artificial Sequence
  Description of Artificial Sequence:  Enzymatic Nucleic acid
ucauauggggaggaaacucccuucaaggacaucguccggguuggaucc

SEQ ID NO: 8578 - RNA, 48 nt, Artificial Sequence
  Description of Artificial Sequence:  Enzymatic Nucleic acid
gauuccguggaggaaacucccuucaaggacaucguccgggauauggcu

SEQ ID NO: 8579 - RNA, 48 nt, Artificial Sequence
  Description of Artificial Sequence:  Enzymatic Nucleic acid
agggauucggaggaaacucccuucaaggacaucguccggggucauaug

SEQ ID NO: 8580 - RNA, 48 nt, Artificial Sequence
  Description of Artificial Sequence:  Enzymatic Nucleic acid
cagggauuggaggaaacucccuucaaggacaucguccgggcgucauau

SEQ ID NO: 8581 - RNA, 48 nt, Artificial Sequence
  Description of Artificial Sequence:  Enzymatic Nucleic acid
cucgcuggggaggaaacucccuucaaggacaucguccgggagggauuc

SEQ ID NO: 8582 - RNA, 48 nt, Artificial Sequence
  Description of Artificial Sequence:  Enzymatic Nucleic acid
agaucucgggaggaaacucccuucaaggacaucguccggguggcaggg

SEQ ID NO: 8583 - RNA, 48 nt, Artificial Sequence
  Description of Artificial Sequence:  Enzymatic Nucleic acid
ggagaucuggaggaaacucccuucaaggacaucguccggggcuggcag

SEQ ID NO: 8584 - RNA, 48 nt, Artificial Sequence
  Description of Artificial Sequence:  Enzymatic Nucleic acid
gaggagauggaggaaacucccuucaaggacaucguccgggucgcuggc

SEQ ID NO: 8585 - RNA, 48 nt, Artificial Sequence
  Description of Artificial Sequence:  Enzymatic Nucleic acid
ccuuucucggaggaaacucccuucaaggacaucguccgggaggaugga

SEQ ID NO: 8586 - RNA, 48 nt, Artificial Sequence
  Description of Artificial Sequence:  Enzymatic Nucleic acid
uccuuucuggaggaaacucccuucaaggacaucguccgggcaggaugg

SEQ ID NO: 8587 - RNA, 48 nt, Artificial Sequence
  Description of Artificial Sequence:  Enzymatic Nucleic acid
ucuccuuuggaggaaacucccuucaaggacaucguccggguccaggau

SEQ ID NO: 8588 - RNA, 48 nt, Artificial Sequence
  Description of Artificial Sequence:  Enzymatic Nucleic acid
gcguucucggaggaaacucccuucaaggacaucguccggguuucucca

SEQ ID NO: 8589 - RNA, 48 nt, Artificial Sequence
  Description of Artificial Sequence:  Enzymatic Nucleic acid
ggcguucuggaggaaacucccuucaaggacaucguccgggcuuucucc

SEQ ID NO: 8590 - RNA, 48 nt, Artificial Sequence
  Description of Artificial Sequence:  Enzymatic Nucleic acid
gaggcguuggaggaaacucccuucaaggacaucguccggguccuuucu

SEQ ID NO: 8591 - RNA, 48 nt, Artificial Sequence
  Description of Artificial Sequence:  Enzymatic Nucleic acid
gagggaggggaggaaacucccuucaaggacaucguccgggguucuccu

SEQ ID NO: 8592 - RNA, 48 nt, Artificial Sequence
  Description of Artificial Sequence:  Enzymatic Nucleic acid
auggguggggaggaaacucccuucaaggacaucguccgggugagggag

SEQ ID NO: 8593 - RNA, 48 nt, Artificial Sequence
  Description of Artificial Sequence:  Enzymatic Nucleic acid
cgaugguaggaggaaacucccuucaaggacaucguccgggauaugggu

SEQ ID NO: 8594 - RNA, 48 nt, Artificial Sequence
  Description of Artificial Sequence:  Enzymatic Nucleic acid
guagacauggaggaaacucccuucaaggacaucguccggggaugguac

SEQ ID NO: 8595 - RNA, 48 nt, Artificial Sequence
  Description of Artificial Sequence:  Enzymatic Nucleic acid
cauguagaggaggaaacucccuucaaggacaucguccgggaucgaugg

SEQ ID NO: 8596 - RNA, 48 nt, Artificial Sequence
  Description of Artificial Sequence:  Enzymatic Nucleic acid
accaugauggaggaaacucccuucaaggacaucguccgggauguagac

SEQ ID NO: 8597 - RNA, 48 nt, Artificial Sequence
  Description of Artificial Sequence:  Enzymatic Nucleic acid
cacuugacggaggaaacucccuucaaggacaucguccgggaugaucau

SEQ ID NO: 8598 - RNA, 48 nt, Artificial Sequence
  Description of Artificial Sequence:  Enzymatic Nucleic acid
gcacuugaggaggaaacucccuucaaggacaucguccgggcaugauca

SEQ ID NO: 8599 - RNA, 48 nt, Artificial Sequence
  Description of Artificial Sequence:  Enzymatic Nucleic acid
auccagcaggaggaaacucccuucaaggacaucguccggguugaccau

SEQ ID NO: 8600 - RNA, 48 nt, Artificial Sequence
  Description of Artificial Sequence:  Enzymatic Nucleic acid
ucauccagggaggaaacucccuucaaggacaucguccgggacuugacc

SEQ ID NO: 8601 - RNA, 48 nt, Artificial Sequence
  Description of Artificial Sequence:  Enzymatic Nucleic acid
cuaucaucggaggaaacucccuucaaggacaucguccgggagcacuug

SEQ ID NO: 8602 - RNA, 48 nt, Artificial Sequence
  Description of Artificial Sequence:  Enzymatic Nucleic acid
ucuaucauggaggaaacucccuucaaggacaucguccgggcagcacuu

SEQ ID NO: 8603 - RNA, 48 nt, Artificial Sequence
  Description of Artificial Sequence:  Enzymatic Nucleic acid
gcgucuauggaggaaacucccuucaaggacaucguccgggauccagca

SEQ ID NO: 8604 - RNA, 48 nt, Artificial Sequence
  Description of Artificial Sequence:  Enzymatic Nucleic acid
aucugcguggaggaaacucccuucaaggacaucguccggguaucaucc

SEQ ID NO: 8605 - RNA, 48 nt, Artificial Sequence
  Description of Artificial Sequence:  Enzymatic Nucleic acid
acuaucugggaggaaacucccuucaaggacaucguccggggucuauca

SEQ ID NO: 8606 - RNA, 48 nt, Artificial Sequence
  Description of Artificial Sequence:  Enzymatic Nucleic acid
gcgacuauggaggaaacucccuucaaggacaucguccgggugcgucua

SEQ ID NO: 8607 - RNA, 48 nt, Artificial Sequence
  Description of Artificial Sequence:  Enzymatic Nucleic acid
uugggcgaggaggaaacucccuucaaggacaucguccggguaucugcg

SEQ ID NO: 8608 - RNA, 48 nt, Artificial Sequence
  Description of Artificial Sequence:  Enzymatic Nucleic acid
acuuugggggaggaaacucccuucaaggacaucguccggggacuaucu

SEQ ID NO: 8609 - RNA, 48 nt, Artificial Sequence
  Description of Artificial Sequence:  Enzymatic Nucleic acid
ucacggaaggaggaaacucccuucaaggacaucguccggguuugggcg

SEQ ID NO: 8610 - RNA, 48 nt, Artificial Sequence
  Description of Artificial Sequence:  Enzymatic Nucleic acid
ucaacucaggaggaaacucccuucaaggacaucguccgggggaacuuu

SEQ ID NO: 8611 - RNA, 48 nt, Artificial Sequence
  Description of Artificial Sequence:  Enzymatic Nucleic acid
gaucaacuggaggaaacucccuucaaggacaucguccgggacggaacu

SEQ ID NO: 8612 - RNA, 48 nt, Artificial Sequence
  Description of Artificial Sequence:  Enzymatic Nucleic acid
augaucaaggaggaaacucccuucaaggacaucguccgggucacggaa

SEQ ID NO: 8613 - RNA, 48 nt, Artificial Sequence
  Description of Artificial Sequence:  Enzymatic Nucleic acid
ucgaugauggaggaaacucccuucaaggacaucguccgggaacucacg

SEQ ID NO: 8614 - RNA, 48 nt, Artificial Sequence
  Description of Artificial Sequence:  Enzymatic Nucleic acid
ggagaauuggaggaaacucccuucaaggacaucguccggggaugauca

SEQ ID NO: 8615 - RNA, 48 nt, Artificial Sequence
  Description of Artificial Sequence:  Enzymatic Nucleic acid
ucucgggcggaggaaacucccuucaaggacaucguccgggauuuugga

SEQ ID NO: 8616 - RNA, 48 nt, Artificial Sequence
  Description of Artificial Sequence:  Enzymatic Nucleic acid
gucucgggggaggaaacucccuucaaggacaucguccgggcauuuugg

SEQ ID NO: 8617 - RNA, 48 nt, Artificial Sequence
  Description of Artificial Sequence:  Enzymatic Nucleic acid
gggggucuggaggaaacucccuucaaggacaucguccggggggccauu

SEQ ID NO: 8618 - RNA, 48 nt, Artificial Sequence
  Description of Artificial Sequence:  Enzymatic Nucleic acid
cuggggguggaggaaacucccuucaaggacaucguccgggucgggcca

SEQ ID NO: 8619 - RNA, 48 nt, Artificial Sequence
  Description of Artificial Sequence:  Enzymatic Nucleic acid
agguagcgggaggaaacucccuucaaggacaucguccggguggggguc

SEQ ID NO: 8620 - RNA, 48 nt, Artificial Sequence
  Description of Artificial Sequence:  Enzymatic Nucleic acid
caagguagggaggaaacucccuucaaggacaucguccggggcuggggg

SEQ ID NO: 8621 - RNA, 48 nt, Artificial Sequence
  Description of Artificial Sequence:  Enzymatic Nucleic acid
cugaaugaggaggaaacucccuucaaggacaucguccgggaagguagc

SEQ ID NO: 8622 - RNA, 48 nt, Artificial Sequence
  Description of Artificial Sequence:  Enzymatic Nucleic acid
ucauccccggaggaaacucccuucaaggacaucguccgggugaaugac

SEQ ID NO: 8623 - RNA, 48 nt, Artificial Sequence
  Description of Artificial Sequence:  Enzymatic Nucleic acid
uucaucccggaggaaacucccuucaaggacaucguccgggcugaauga

SEQ ID NO: 8624 - RNA, 48 nt, Artificial Sequence
  Description of Artificial Sequence:  Enzymatic Nucleic acid
uuucauccggaggaaacucccuucaaggacaucguccgggccugaaug

SEQ ID NO: 8625 - RNA, 48 nt, Artificial Sequence
  Description of Artificial Sequence:  Enzymatic Nucleic acid
cuuucaucggaggaaacucccuucaaggacaucguccgggcccugaau

SEQ ID NO: 8626 - RNA, 48 nt, Artificial Sequence
  Description of Artificial Sequence:  Enzymatic Nucleic acid
ucuuucauggaggaaacucccuucaaggacaucguccgggccccugaa

SEQ ID NO: 8627 - RNA, 48 nt, Artificial Sequence
  Description of Artificial Sequence:  Enzymatic Nucleic acid
cauucuuuggaggaaacucccuucaaggacaucguccgggaucccccu

SEQ ID NO: 8628 - RNA, 48 nt, Artificial Sequence
  Description of Artificial Sequence:  Enzymatic Nucleic acid
aaugcauuggaggaaacucccuucaaggacaucguccggguuucaucc

SEQ ID NO: 8629 - RNA, 48 nt, Artificial Sequence
  Description of Artificial Sequence:  Enzymatic Nucleic acid
ggcaaaugggaggaaacucccuucaaggacaucguccgggauucuuuc

SEQ ID NO: 8630 - RNA, 48 nt, Artificial Sequence
  Description of Artificial Sequence:  Enzymatic Nucleic acid
ggacuuggggaggaaacucccuucaaggacaucguccgggaaaugcau

SEQ ID NO: 8631 - RNA, 48 nt, Artificial Sequence
  Description of Artificial Sequence:  Enzymatic Nucleic acid
cuguaggaggaggaaacucccuucaaggacaucguccggguuggcaaa

SEQ ID NO: 8632 - RNA, 48 nt, Artificial Sequence
  Description of Artificial Sequence:  Enzymatic Nucleic acid
guuggaguggaggaaacucccuucaaggacaucguccggguguaggac

SEQ ID NO: 8633 - RNA, 48 nt, Artificial Sequence
  Description of Artificial Sequence:  Enzymatic Nucleic acid
ucagggcaggaggaaacucccuucaaggacaucguccggggguagaag

SEQ ID NO: 8634 - RNA, 48 nt, Artificial Sequence
  Description of Artificial Sequence:  Enzymatic Nucleic acid
caucagggggaggaaacucccuucaaggacaucguccgggacgguaga

SEQ ID NO: 8635 - RNA, 48 nt, Artificial Sequence
  Description of Artificial Sequence:  Enzymatic Nucleic acid
ucauccauggaggaaacucccuucaaggacaucguccgggagggcacg

SEQ ID NO: 8636 - RNA, 48 nt, Artificial Sequence
  Description of Artificial Sequence:  Enzymatic Nucleic acid
ucuucaucggaggaaacucccuucaaggacaucguccgggaucagggc

SEQ ID NO: 8637 - RNA, 48 nt, Artificial Sequence
  Description of Artificial Sequence:  Enzymatic Nucleic acid
uucuucauggaggaaacucccuucaaggacaucguccgggcaucaggg

SEQ ID NO: 8638 - RNA, 48 nt, Artificial Sequence
  Description of Artificial Sequence:  Enzymatic Nucleic acid
gucuucuuggaggaaacucccuucaaggacaucguccgggauccauca

SEQ ID NO: 8639 - RNA, 48 nt, Artificial Sequence
  Description of Artificial Sequence:  Enzymatic Nucleic acid
caugucuuggaggaaacucccuucaaggacaucguccggguucaucca

SEQ ID NO: 8640 - RNA, 48 nt, Artificial Sequence
  Description of Artificial Sequence:  Enzymatic Nucleic acid
guccauguggaggaaacucccuucaaggacaucguccggguucuucau

SEQ ID NO: 8641 - RNA, 48 nt, Artificial Sequence
  Description of Artificial Sequence:  Enzymatic Nucleic acid
acgucgucggaggaaacucccuucaaggacaucguccgggaugucuuc

SEQ ID NO: 8642 - RNA, 48 nt, Artificial Sequence
  Description of Artificial Sequence:  Enzymatic Nucleic acid
cacgucguggaggaaacucccuucaaggacaucguccgggcaugucuu

SEQ ID NO: 8643 - RNA, 48 nt, Artificial Sequence
  Description of Artificial Sequence:  Enzymatic Nucleic acid
caccacguggaggaaacucccuucaaggacaucguccgggguccaugu

SEQ ID NO: 8644 - RNA, 48 nt, Artificial Sequence
  Description of Artificial Sequence:  Enzymatic Nucleic acid
auccaccaggaggaaacucccuucaaggacaucguccggggucgucca

SEQ ID NO: 8645 - RNA, 48 nt, Artificial Sequence
  Description of Artificial Sequence:  Enzymatic Nucleic acid
gcauccacggaggaaacucccuucaaggacaucguccgggacgucguc

SEQ ID NO: 8646 - RNA, 48 nt, Artificial Sequence
  Description of Artificial Sequence:  Enzymatic Nucleic acid
ggcauccaggaggaaacucccuucaaggacaucguccgggcacgucgu

SEQ ID NO: 8647 - RNA, 48 nt, Artificial Sequence
  Description of Artificial Sequence:  Enzymatic Nucleic acid
ucggcaucggaggaaacucccuucaaggacaucguccgggaccacguc

SEQ ID NO: 8648 - RNA, 48 nt, Artificial Sequence
  Description of Artificial Sequence:  Enzymatic Nucleic acid
gucggcauggaggaaacucccuucaaggacaucguccgggcaccacgu

SEQ ID NO: 8649 - RNA, 48 nt, Artificial Sequence
  Description of Artificial Sequence:  Enzymatic Nucleic acid
cucgucggggaggaaacucccuucaaggacaucguccgggauccacca

SEQ ID NO: 8650 - RNA, 48 nt, Artificial Sequence
  Description of Artificial Sequence:  Enzymatic Nucleic acid
guacucguggaggaaacucccuucaaggacaucguccgggggcaucca

SEQ ID NO: 8651 - RNA, 48 nt, Artificial Sequence
  Description of Artificial Sequence:  Enzymatic Nucleic acid
gagguacuggaggaaacucccuucaaggacaucguccggggucggcau

SEQ ID NO: 8652 - RNA, 48 nt, Artificial Sequence
  Description of Artificial Sequence:  Enzymatic Nucleic acid
augagguaggaggaaacucccuucaaggacaucguccgggucgucggc

SEQ ID NO: 8653 - RNA, 48 nt, Artificial Sequence
  Description of Artificial Sequence:  Enzymatic Nucleic acid
aagcccugggaggaaacucccuucaaggacaucguccgggugugggau

SEQ ID NO: 8654 - RNA, 48 nt, Artificial Sequence
  Description of Artificial Sequence:  Enzymatic Nucleic acid
aagaagccggaggaaacucccuucaaggacaucguccgggugcugugg

SEQ ID NO: 8655 - RNA, 48 nt, Artificial Sequence
  Description of Artificial Sequence:  Enzymatic Nucleic acid
gaagaagcggaggaaacucccuucaaggacaucguccgggcugcugug

SEQ ID NO: 8656 - RNA, 48 nt, Artificial Sequence
  Description of Artificial Sequence:  Enzymatic Nucleic acid
ugaagaagggaggaaacucccuucaaggacaucguccgggccugcugu

SEQ ID NO: 8657 - RNA, 48 nt, Artificial Sequence
  Description of Artificial Sequence:  Enzymatic Nucleic acid
aggggcugggaggaaacucccuucaaggacaucguccgggugaagaag

SEQ ID NO: 8658 - RNA, 48 nt, Artificial Sequence
  Description of Artificial Sequence:  Enzymatic Nucleic acid
uggaggggggaggaaacucccuucaaggacaucguccgggugcugaag

SEQ ID NO: 8659 - RNA, 48 nt, Artificial Sequence
  Description of Artificial Sequence:  Enzymatic Nucleic acid
guccgugaggaggaaacucccuucaaggacaucguccgggguggaggg

SEQ ID NO: 8660 - RNA, 48 nt, Artificial Sequence
  Description of Artificial Sequence:  Enzymatic Nucleic acid
ggggagucggaggaaacucccuucaaggacaucguccggggugacgug

SEQ ID NO: 8661 - RNA, 48 nt, Artificial Sequence
  Description of Artificial Sequence:  Enzymatic Nucleic acid
aggggaguggaggaaacucccuucaaggacaucguccgggcgugacgu

SEQ ID NO: 8662 - RNA, 48 nt, Artificial Sequence
  Description of Artificial Sequence:  Enzymatic Nucleic acid
agagagcuggaggaaacucccuucaaggacaucguccgggaggagggg

SEQ ID NO: 8663 - RNA, 48 nt, Artificial Sequence
  Description of Artificial Sequence:  Enzymatic Nucleic acid
ucagagagggaggaaacucccuucaaggacaucguccgggucaggagg

SEQ ID NO: 8664 - RNA, 48 nt, Artificial Sequence
  Description of Artificial Sequence:  Enzymatic Nucleic acid
guugcacuggaggaaacucccuucaaggacaucguccgggagagagcu

SEQ ID NO: 8665 - RNA, 48 nt, Artificial Sequence
  Description of Artificial Sequence:  Enzymatic Nucleic acid
ugguugcaggaggaaacucccuucaaggacaucguccgggucagagag

SEQ ID NO: 8666 - RNA, 48 nt, Artificial Sequence
  Description of Artificial Sequence:  Enzymatic Nucleic acid
gcugguugggaggaaacucccuucaaggacaucguccgggacucagag

SEQ ID NO: 8667 - RNA, 48 nt, Artificial Sequence
  Description of Artificial Sequence:  Enzymatic Nucleic acid
aauuguugggaggaaacucccuucaaggacaucguccgggugguugca

SEQ ID NO: 8668 - RNA, 48 nt, Artificial Sequence
  Description of Artificial Sequence:  Enzymatic Nucleic acid
gcaagccaggaggaaacucccuucaaggacaucguccggggguggaau

SEQ ID NO: 8669 - RNA, 48 nt, Artificial Sequence
  Description of Artificial Sequence:  Enzymatic Nucleic acid
augcaagcggaggaaacucccuucaaggacaucguccgggacggugga

SEQ ID NO: 8670 - RNA, 48 nt, Artificial Sequence
  Description of Artificial Sequence:  Enzymatic Nucleic acid
aaugcaagggaggaaacucccuucaaggacaucguccgggcacggugg

SEQ ID NO: 8671 - RNA, 48 nt, Artificial Sequence
  Description of Artificial Sequence:  Enzymatic Nucleic acid
uaucaaugggaggaaacucccuucaaggacaucguccgggaagccacg

SEQ ID NO: 8672 - RNA, 48 nt, Artificial Sequence
  Description of Artificial Sequence:  Enzymatic Nucleic acid
auuucuauggaggaaacucccuucaaggacaucguccgggaaugcaag

SEQ ID NO: 8673 - RNA, 48 nt, Artificial Sequence
  Description of Artificial Sequence:  Enzymatic Nucleic acid
gcccauuuggaggaaacucccuucaaggacaucguccggguaucaaug

SEQ ID NO: 8674 - RNA, 48 nt, Artificial Sequence
  Description of Artificial Sequence:  Enzymatic Nucleic acid
uugcagccggaggaaacucccuucaaggacaucguccgggauuucuau

SEQ ID NO: 8675 - RNA, 48 nt, Artificial Sequence
  Description of Artificial Sequence:  Enzymatic Nucleic acid
uuugcagcggaggaaacucccuucaaggacaucguccgggcauuucua

SEQ ID NO: 8676 - RNA, 48 nt, Artificial Sequence
  Description of Artificial Sequence:  Enzymatic Nucleic acid
cuuugcagggaggaaacucccuucaaggacaucguccgggccauuucu

SEQ ID NO: 8677 - RNA, 48 nt, Artificial Sequence
  Description of Artificial Sequence:  Enzymatic Nucleic acid
cagcuuugggaggaaacucccuucaaggacaucguccgggagcccauu

SEQ ID NO: 8678 - RNA, 48 nt, Artificial Sequence
  Description of Artificial Sequence:  Enzymatic Nucleic acid
ugggacagggaggaaacucccuucaaggacaucguccggguuugcagc

SEQ ID NO: 8679 - RNA, 48 nt, Artificial Sequence
  Description of Artificial Sequence:  Enzymatic Nucleic acid
ugaugggaggaggaaacucccuucaaggacaucguccgggagcuuugc

SEQ ID NO: 8680 - RNA, 48 nt, Artificial Sequence
  Description of Artificial Sequence:  Enzymatic Nucleic acid
cugucuucggaggaaacucccuucaaggacaucguccggguugauggg

SEQ ID NO: 8681 - RNA, 48 nt, Artificial Sequence
  Description of Artificial Sequence:  Enzymatic Nucleic acid
gcugucuuggaggaaacucccuucaaggacaucguccgggcuugaugg

SEQ ID NO: 8682 - RNA, 48 nt, Artificial Sequence
  Description of Artificial Sequence:  Enzymatic Nucleic acid
gaagcuguggaggaaacucccuucaaggacaucguccggguuccuuga

SEQ ID NO: 8683 - RNA, 48 nt, Artificial Sequence
  Description of Artificial Sequence:  Enzymatic Nucleic acid
gcaagaagggaggaaacucccuucaaggacaucguccgggugucuucc

SEQ ID NO: 8684 - RNA, 48 nt, Artificial Sequence
  Description of Artificial Sequence:  Enzymatic Nucleic acid
uaucgcugggaggaaacucccuucaaggacaucguccgggaagaagcu

SEQ ID NO: 8685 - RNA, 48 nt, Artificial Sequence
  Description of Artificial Sequence:  Enzymatic Nucleic acid
cuguaucgggaggaaacucccuucaaggacaucguccgggugcaagaa

SEQ ID NO: 8686 - RNA, 48 nt, Artificial Sequence
  Description of Artificial Sequence:  Enzymatic Nucleic acid
agcuguauggaggaaacucccuucaaggacaucguccggggcugcaag

SEQ ID NO: 8687 - RNA, 48 nt, Artificial Sequence
  Description of Artificial Sequence:  Enzymatic Nucleic acid
ggucugagggaggaaacucccuucaaggacaucguccggguguaucgc

SEQ ID NO: 8688 - RNA, 48 nt, Artificial Sequence
  Description of Artificial Sequence:  Enzymatic Nucleic acid
ugugggguggaggaaacucccuucaaggacaucguccgggugagcugu

SEQ ID NO: 8689 - RNA, 48 nt, Artificial Sequence
  Description of Artificial Sequence:  Enzymatic Nucleic acid
caaggcgcggaggaaacucccuucaaggacaucguccggguguggggu

SEQ ID NO: 8690 - RNA, 48 nt, Artificial Sequence
  Description of Artificial Sequence:  Enzymatic Nucleic acid
ucaaggcgggaggaaacucccuucaaggacaucguccgggcugugggg

SEQ ID NO: 8691 - RNA, 48 nt, Artificial Sequence
  Description of Artificial Sequence:  Enzymatic Nucleic acid
agucaaggggaggaaacucccuucaaggacaucguccggggccugugg

SEQ ID NO: 8692 - RNA, 48 nt, Artificial Sequence
  Description of Artificial Sequence:  Enzymatic Nucleic acid
uccucaguggaggaaacucccuucaaggacaucguccgggaaggcgcc

SEQ ID NO: 8693 - RNA, 48 nt, Artificial Sequence
  Description of Artificial Sequence:  Enzymatic Nucleic acid
gcuguccuggaggaaacucccuucaaggacaucguccgggagucaagg

SEQ ID NO: 8694 - RNA, 48 nt, Artificial Sequence
  Description of Artificial Sequence:  Enzymatic Nucleic acid
augcugucggaggaaacucccuucaaggacaucguccgggucagucaa

SEQ ID NO: 8695 - RNA, 48 nt, Artificial Sequence
  Description of Artificial Sequence:  Enzymatic Nucleic acid
uaugcuguggaggaaacucccuucaaggacaucguccgggcucaguca

SEQ ID NO: 8696 - RNA, 48 nt, Artificial Sequence
  Description of Artificial Sequence:  Enzymatic Nucleic acid
cgucuaugggaggaaacucccuucaaggacaucguccggguguccuca

SEQ ID NO: 8697 - RNA, 48 nt, Artificial Sequence
  Description of Artificial Sequence:  Enzymatic Nucleic acid
ggugucguggaggaaacucccuucaaggacaucguccggguaugcugu

SEQ ID NO: 8698 - RNA, 48 nt, Artificial Sequence
  Description of Artificial Sequence:  Enzymatic Nucleic acid
gaagguguggaggaaacucccuucaaggacaucguccggggucuaugc

SEQ ID NO: 8699 - RNA, 48 nt, Artificial Sequence
  Description of Artificial Sequence:  Enzymatic Nucleic acid
uucaggcaggaggaaacucccuucaaggacaucguccgggugggagga

SEQ ID NO: 8700 - RNA, 48 nt, Artificial Sequence
  Description of Artificial Sequence:  Enzymatic Nucleic acid
uauucaggggaggaaacucccuucaaggacaucguccgggacugggag

SEQ ID NO: 8701 - RNA, 48 nt, Artificial Sequence
  Description of Artificial Sequence:  Enzymatic Nucleic acid
uauguauuggaggaaacucccuucaaggacaucguccgggaggcacug

SEQ ID NO: 8702 - RNA, 48 nt, Artificial Sequence
  Description of Artificial Sequence:  Enzymatic Nucleic acid
ggaacggaggaggaaacucccuucaaggacaucguccgggugguuuau

SEQ ID NO: 8703 - RNA, 48 nt, Artificial Sequence
  Description of Artificial Sequence:  Enzymatic Nucleic acid
uuugggaaggaggaaacucccuucaaggacaucguccgggggacuggu

SEQ ID NO: 8704 - RNA, 48 nt, Artificial Sequence
  Description of Artificial Sequence:  Enzymatic Nucleic acid
cagcgggcggaggaaacucccuucaaggacaucguccggguuuuggga

SEQ ID NO: 8705 - RNA, 48 nt, Artificial Sequence
  Description of Artificial Sequence:  Enzymatic Nucleic acid
ccagcgggggaggaaacucccuucaaggacaucguccgggcuuuuggg

SEQ ID NO: 8706 - RNA, 48 nt, Artificial Sequence
  Description of Artificial Sequence:  Enzymatic Nucleic acid
agagccagggaggaaacucccuucaaggacaucguccggggggccuuu

SEQ ID NO: 8707 - RNA, 48 nt, Artificial Sequence
  Description of Artificial Sequence:  Enzymatic Nucleic acid
cacagagcggaggaaacucccuucaaggacaucguccgggagcgggcc

SEQ ID NO: 8708 - RNA, 48 nt, Artificial Sequence
  Description of Artificial Sequence:  Enzymatic Nucleic acid
gcacagagggaggaaacucccuucaaggacaucguccgggcagcgggc

SEQ ID NO: 8709 - RNA, 48 nt, Artificial Sequence
  Description of Artificial Sequence:  Enzymatic Nucleic acid
auucugcaggaggaaacucccuucaaggacaucguccgggagagccag

SEQ ID NO: 8710 - RNA, 48 nt, Artificial Sequence
  Description of Artificial Sequence:  Enzymatic Nucleic acid
ggauucugggaggaaacucccuucaaggacaucguccgggacagagcc

SEQ ID NO: 8711 - RNA, 48 nt, Artificial Sequence
  Description of Artificial Sequence:  Enzymatic Nucleic acid
acaggauuggaggaaacucccuucaaggacaucguccgggugcacaga

SEQ ID NO: 8712 - RNA, 48 nt, Artificial Sequence
  Description of Artificial Sequence:  Enzymatic Nucleic acid
gugauagaggaggaaacucccuucaaggacaucguccgggaggauucu

SEQ ID NO: 8713 - RNA, 48 nt, Artificial Sequence
  Description of Artificial Sequence:  Enzymatic Nucleic acid
uucagaggggaggaaacucccuucaaggacaucguccgggugauugug

SEQ ID NO: 8714 - RNA, 48 nt, Artificial Sequence
  Description of Artificial Sequence:  Enzymatic Nucleic acid
gcgggguuggaggaaacucccuucaaggacaucguccgggagaggcug

SEQ ID NO: 8715 - RNA, 48 nt, Artificial Sequence
  Description of Artificial Sequence:  Enzymatic Nucleic acid
gcugggcgggaggaaacucccuucaaggacaucguccggggggguuca

SEQ ID NO: 8716 - RNA, 48 nt, Artificial Sequence
  Description of Artificial Sequence:  Enzymatic Nucleic acid
cugcugggggaggaaacucccuucaaggacaucguccggggcgggguu

SEQ ID NO: 8717 - RNA, 48 nt, Artificial Sequence
  Description of Artificial Sequence:  Enzymatic Nucleic acid
ggucucugggaggaaacucccuucaaggacaucguccgggugggcgcg

SEQ ID NO: 8718 - RNA, 48 nt, Artificial Sequence
  Description of Artificial Sequence:  Enzymatic Nucleic acid
gugggucuggaggaaacucccuucaaggacaucguccgggugcugggc

SEQ ID NO: 8719 - RNA, 48 nt, Artificial Sequence
  Description of Artificial Sequence:  Enzymatic Nucleic acid
guguggguggaggaaacucccuucaaggacaucguccgggucugcugg

SEQ ID NO: 8720 - RNA, 48 nt, Artificial Sequence
  Description of Artificial Sequence:  Enzymatic Nucleic acid
ugggggucggaggaaacucccuucaaggacaucguccgggugguagug

SEQ ID NO: 8721 - RNA, 48 nt, Artificial Sequence
  Description of Artificial Sequence:  Enzymatic Nucleic acid
guggggguggaggaaacucccuucaaggacaucguccgggcugguagu

SEQ ID NO: 8722 - RNA, 48 nt, Artificial Sequence
  Description of Artificial Sequence:  Enzymatic Nucleic acid
cugcagugggaggaaacucccuucaaggacaucguccggguguggggg

SEQ ID NO: 8723 - RNA, 48 nt, Artificial Sequence
  Description of Artificial Sequence:  Enzymatic Nucleic acid
gcccacugggaggaaacucccuucaaggacaucguccgggagugcugu

SEQ ID NO: 8724 - RNA, 48 nt, Artificial Sequence
  Description of Artificial Sequence:  Enzymatic Nucleic acid
guugcccaggaggaaacucccuucaaggacaucguccgggugcagugc

SEQ ID NO: 8725 - RNA, 48 nt, Artificial Sequence
  Description of Artificial Sequence:  Enzymatic Nucleic acid
ggguugccggaggaaacucccuucaaggacaucguccgggacugcagu

SEQ ID NO: 8726 - RNA, 48 nt, Artificial Sequence
  Description of Artificial Sequence:  Enzymatic Nucleic acid
gggguugcggaggaaacucccuucaaggacaucguccgggcacugcag

SEQ ID NO: 8727 - RNA, 48 nt, Artificial Sequence
  Description of Artificial Sequence:  Enzymatic Nucleic acid
cgggguugggaggaaacucccuucaaggacaucguccgggccacugca

SEQ ID NO: 8728 - RNA, 48 nt, Artificial Sequence
  Description of Artificial Sequence:  Enzymatic Nucleic acid
gagauacuggaggaaacucccuucaaggacaucguccggggggguugc

SEQ ID NO: 8729 - RNA, 48 nt, Artificial Sequence
  Description of Artificial Sequence:  Enzymatic Nucleic acid
uugagauaggaggaaacucccuucaaggacaucguccgggucgggguu

SEQ ID NO: 8730 - RNA, 48 nt, Artificial Sequence
  Description of Artificial Sequence:  Enzymatic Nucleic acid
gggcuggaggaggaaacucccuucaaggacaucguccgggaguguuga

SEQ ID NO: 8731 - RNA, 48 nt, Artificial Sequence
  Description of Artificial Sequence:  Enzymatic Nucleic acid
caggugggggaggaaacucccuucaaggacaucguccggguggacagu

SEQ ID NO: 8732 - RNA, 48 nt, Artificial Sequence
  Description of Artificial Sequence:  Enzymatic Nucleic acid
uguugacaggaggaaacucccuucaaggacaucguccgggaggugggc

SEQ ID NO: 8733 - RNA, 48 nt, Artificial Sequence
  Description of Artificial Sequence:  Enzymatic Nucleic acid
gcuguugaggaggaaacucccuucaaggacaucguccgggacaggugg

SEQ ID NO: 8734 - RNA, 48 nt, Artificial Sequence
  Description of Artificial Sequence:  Enzymatic Nucleic acid
cgaaugugggaggaaacucccuucaaggacaucguccggguguugaca

SEQ ID NO: 8735 - RNA, 48 nt, Artificial Sequence
  Description of Artificial Sequence:  Enzymatic Nucleic acid
agggcuguggaggaaacucccuucaaggacaucguccggggaaugugc

SEQ ID NO: 8736 - RNA, 48 nt, Artificial Sequence
  Description of Artificial Sequence:  Enzymatic Nucleic acid
gggcagggggaggaaacucccuucaaggacaucguccgggugucgaau

SEQ ID NO: 8737 - RNA, 48 nt, Artificial Sequence
  Description of Artificial Sequence:  Enzymatic Nucleic acid
ccagugggggaggaaacucccuucaaggacaucguccgggagggcugu

SEQ ID NO: 8738 - RNA, 48 nt, Artificial Sequence
  Description of Artificial Sequence:  Enzymatic Nucleic acid
ucugggccggaggaaacucccuucaaggacaucguccgggagugggca

SEQ ID NO: 8739 - RNA, 48 nt, Artificial Sequence
  Description of Artificial Sequence:  Enzymatic Nucleic acid
uucugggcggaggaaacucccuucaaggacaucguccgggcagugggc

SEQ ID NO: 8740 - RNA, 48 nt, Artificial Sequence
  Description of Artificial Sequence:  Enzymatic Nucleic acid
uuucugggggaggaaacucccuucaaggacaucguccgggccaguggg

SEQ ID NO: 8741 - RNA, 48 nt, Artificial Sequence
  Description of Artificial Sequence:  Enzymatic Nucleic acid
cugccuuuggaggaaacucccuucaaggacaucguccgggugggccca

SEQ ID NO: 8742 - RNA, 48 nt, Artificial Sequence
  Description of Artificial Sequence:  Enzymatic Nucleic acid
guggcugcggaggaaacucccuucaaggacaucguccggguuucuggg

SEQ ID NO: 8743 - RNA, 48 nt, Artificial Sequence
  Description of Artificial Sequence:  Enzymatic Nucleic acid
gguggcugggaggaaacucccuucaaggacaucguccgggcuuucugg

SEQ ID NO: 8744 - RNA, 48 nt, Artificial Sequence
  Description of Artificial Sequence:  Enzymatic Nucleic acid
uuugguggggaggaaacucccuucaaggacaucguccgggugccuuuc

SEQ ID NO: 8745 - RNA, 48 nt, Artificial Sequence
  Description of Artificial Sequence:  Enzymatic Nucleic acid
uguccaggggaggaaacucccuucaaggacaucguccggguaauuugg

SEQ ID NO: 8746 - RNA, 48 nt, Artificial Sequence
  Description of Artificial Sequence:  Enzymatic Nucleic acid
ggguugucggaggaaacucccuucaaggacaucguccgggaggcuaau

SEQ ID NO: 8747 - RNA, 48 nt, Artificial Sequence
  Description of Artificial Sequence:  Enzymatic Nucleic acid
aggguuguggaggaaacucccuucaaggacaucguccgggcaggcuaa

SEQ ID NO: 8748 - RNA, 48 nt, Artificial Sequence
  Description of Artificial Sequence:  Enzymatic Nucleic acid
cugguaguggaggaaacucccuucaaggacaucguccgggaggguugu

SEQ ID NO: 8749 - RNA, 48 nt, Artificial Sequence
  Description of Artificial Sequence:  Enzymatic Nucleic acid
aaguccugggaggaaacucccuucaaggacaucguccgggugguaguc

SEQ ID NO: 8750 - RNA, 48 nt, Artificial Sequence
  Description of Artificial Sequence:  Enzymatic Nucleic acid
aagaagucggaggaaacucccuucaaggacaucguccgggugcuggua

SEQ ID NO: 8751 - RNA, 48 nt, Artificial Sequence
  Description of Artificial Sequence:  Enzymatic Nucleic acid
aaagaaguggaggaaacucccuucaaggacaucguccgggcugcuggu

SEQ ID NO: 8752 - RNA, 48 nt, Artificial Sequence
  Description of Artificial Sequence:  Enzymatic Nucleic acid
uuggcuucggaggaaacucccuucaaggacaucguccggguugggaaa

SEQ ID NO: 8753 - RNA, 48 nt, Artificial Sequence
  Description of Artificial Sequence:  Enzymatic Nucleic acid
cuuggcuuggaggaaacucccuucaaggacaucguccgggcuugggaa

SEQ ID NO: 8754 - RNA, 48 nt, Artificial Sequence
  Description of Artificial Sequence:  Enzymatic Nucleic acid
uggcuuggggaggaaacucccuucaaggacaucguccggguuccuugg

SEQ ID NO: 8755 - RNA, 48 nt, Artificial Sequence
  Description of Artificial Sequence:  Enzymatic Nucleic acid
ccauuuggggaggaaacucccuucaaggacaucguccggguuggcuuc

SEQ ID NO: 8756 - RNA, 48 nt, Artificial Sequence
  Description of Artificial Sequence:  Enzymatic Nucleic acid
aaagaugcggaggaaacucccuucaaggacaucguccgggauuuggcu

SEQ ID NO: 8757 - RNA, 48 nt, Artificial Sequence
  Description of Artificial Sequence:  Enzymatic Nucleic acid
uaaagaugggaggaaacucccuucaaggacaucguccgggcauuuggc

SEQ ID NO: 8758 - RNA, 48 nt, Artificial Sequence
  Description of Artificial Sequence:  Enzymatic Nucleic acid
guggagccggaggaaacucccuucaaggacaucguccggguuaaagau

SEQ ID NO: 8759 - RNA, 48 nt, Artificial Sequence
  Description of Artificial Sequence:  Enzymatic Nucleic acid
uguggagcggaggaaacucccuucaaggacaucguccgggcuuaaaga

SEQ ID NO: 8760 - RNA, 48 nt, Artificial Sequence
  Description of Artificial Sequence:  Enzymatic Nucleic acid
cuguggagggaggaaacucccuucaaggacaucguccgggccuuaaag

SEQ ID NO: 8761 - RNA, 48 nt, Artificial Sequence
  Description of Artificial Sequence:  Enzymatic Nucleic acid
auuuucagggaggaaacucccuucaaggacaucguccggguguggagc

SEQ ID NO: 8762 - RNA, 48 nt, Artificial Sequence
  Description of Artificial Sequence:  Enzymatic Nucleic acid
ugcauuuuggaggaaacucccuucaaggacaucguccgggagcugugg

SEQ ID NO: 8763 - RNA, 48 nt, Artificial Sequence
  Description of Artificial Sequence:  Enzymatic Nucleic acid
guauucugggaggaaacucccuucaaggacaucguccgggauuuucag

SEQ ID NO: 8764 - RNA, 48 nt, Artificial Sequence
  Description of Artificial Sequence:  Enzymatic Nucleic acid
uagguauuggaggaaacucccuucaaggacaucguccgggugcauuuu

SEQ ID NO: 8765 - RNA, 48 nt, Artificial Sequence
  Description of Artificial Sequence:  Enzymatic Nucleic acid
gcgcgaccggaggaaacucccuucaaggacaucguccggguuagguau

SEQ ID NO: 8766 - RNA, 48 nt, Artificial Sequence
  Description of Artificial Sequence:  Enzymatic Nucleic acid
ggcgcgacggaggaaacucccuucaaggacaucguccgggcuuaggua

SEQ ID NO: 8767 - RNA, 48 nt, Artificial Sequence
  Description of Artificial Sequence:  Enzymatic Nucleic acid
uggcgcgaggaggaaacucccuucaaggacaucguccgggccuuaggu

SEQ ID NO: 8768 - RNA, 48 nt, Artificial Sequence
  Description of Artificial Sequence:  Enzymatic Nucleic acid
uuguggcgggaggaaacucccuucaaggacaucguccggggacccuua

SEQ ID NO: 8769 - RNA, 48 nt, Artificial Sequence
  Description of Artificial Sequence:  Enzymatic Nucleic acid
cuuuguggggaggaaacucccuucaaggacaucguccggggcgacccu

SEQ ID NO: 8770 - RNA, 48 nt, Artificial Sequence
  Description of Artificial Sequence:  Enzymatic Nucleic acid
auucacugggaggaaacucccuucaaggacaucguccggguuuguggc

SEQ ID NO: 8771 - RNA, 48 nt, Artificial Sequence
  Description of Artificial Sequence:  Enzymatic Nucleic acid
uaaauucaggaggaaacucccuucaaggacaucguccgggugcuuugu

SEQ ID NO: 8772 - RNA, 48 nt, Artificial Sequence
  Description of Artificial Sequence:  Enzymatic Nucleic acid
aauaaauuggaggaaacucccuucaaggacaucguccgggacugcuuu

SEQ ID NO: 8773 - RNA, 48 nt, Artificial Sequence
  Description of Artificial Sequence:  Enzymatic Nucleic acid
ucaugcucggaggaaacucccuucaaggacaucguccgggaauaaauu

SEQ ID NO: 8774 - RNA, 48 nt, Artificial Sequence
  Description of Artificial Sequence:  Enzymatic Nucleic acid
gucaugcuggaggaaacucccuucaaggacaucguccgggcaauaaau

SEQ ID NO: 8775 - RNA, 48 nt, Artificial Sequence
  Description of Artificial Sequence:  Enzymatic Nucleic acid
uggucaugggaggaaacucccuucaaggacaucguccggguccaauaa

SEQ ID NO: 8776 - RNA, 48 nt, Artificial Sequence
  Description of Artificial Sequence:  Enzymatic Nucleic acid
uccgugguggaggaaacucccuucaaggacaucguccgggaugcucca

SEQ ID NO: 8777 - RNA, 48 nt, Artificial Sequence
  Description of Artificial Sequence:  Enzymatic Nucleic acid
cuauccucggaggaaacucccuucaaggacaucguccgggguggucau

SEQ ID NO: 8778 - RNA, 48 nt, Artificial Sequence
  Description of Artificial Sequence:  Enzymatic Nucleic acid
acuauccuggaggaaacucccuucaaggacaucguccgggcgugguca

SEQ ID NO: 8779 - RNA, 48 nt, Artificial Sequence
  Description of Artificial Sequence:  Enzymatic Nucleic acid
auacuaucggaggaaacucccuucaaggacaucguccggguccguggu

SEQ ID NO: 8780 - RNA, 48 nt, Artificial Sequence
  Description of Artificial Sequence:  Enzymatic Nucleic acid
cauacuauggaggaaacucccuucaaggacaucguccgggcuccgugg

SEQ ID NO: 8781 - RNA, 48 nt, Artificial Sequence
  Description of Artificial Sequence:  Enzymatic Nucleic acid
ggcucauaggaggaaacucccuucaaggacaucguccggguauccucc

SEQ ID NO: 8782 - RNA, 48 nt, Artificial Sequence
  Description of Artificial Sequence:  Enzymatic Nucleic acid
uuagggcuggaggaaacucccuucaaggacaucguccgggauacuauc

SEQ ID NO: 8783 - RNA, 48 nt, Artificial Sequence
  Description of Artificial Sequence:  Enzymatic Nucleic acid
uuuuagggggaggaaacucccuucaaggacaucguccgggucauacua

SEQ ID NO: 8784 - RNA, 48 nt, Artificial Sequence
  Description of Artificial Sequence:  Enzymatic Nucleic acid
gaaagaguggaggaaacucccuucaaggacaucguccggguggauuuu

SEQ ID NO: 8785 - RNA, 48 nt, Artificial Sequence
  Description of Artificial Sequence:  Enzymatic Nucleic acid
cuggguauggaggaaacucccuucaaggacaucguccggggaaagagu

SEQ ID NO: 8786 - RNA, 48 nt, Artificial Sequence
  Description of Artificial Sequence:  Enzymatic Nucleic acid
gcuuggucggaggaaacucccuucaaggacaucguccggguggguauc

SEQ ID NO: 8787 - RNA, 48 nt, Artificial Sequence
  Description of Artificial Sequence:  Enzymatic Nucleic acid
ggcuugguggaggaaacucccuucaaggacaucguccgggcuggguau

SEQ ID NO: 8788 - RNA, 48 nt, Artificial Sequence
  Description of Artificial Sequence:  Enzymatic Nucleic acid
ugcuguggggaggaaacucccuucaaggacaucguccggguugguccu

SEQ ID NO: 8789 - RNA, 48 nt, Artificial Sequence
  Description of Artificial Sequence:  Enzymatic Nucleic acid
aggaccugggaggaaacucccuucaaggacaucguccggguguggcuu

SEQ ID NO: 8790 - RNA, 48 nt, Artificial Sequence
  Description of Artificial Sequence:  Enzymatic Nucleic acid
uggaggacggaggaaacucccuucaaggacaucguccgggugcugugg

SEQ ID NO: 8791 - RNA, 48 nt, Artificial Sequence
  Description of Artificial Sequence:  Enzymatic Nucleic acid
auggaggaggaggaaacucccuucaaggacaucguccgggcugcugug

SEQ ID NO: 8792 - RNA, 48 nt, Artificial Sequence
  Description of Artificial Sequence:  Enzymatic Nucleic acid
gggcauggggaggaaacucccuucaaggacaucguccggguguuggga

SEQ ID NO: 8793 - RNA, 48 nt, Artificial Sequence
  Description of Artificial Sequence:  Enzymatic Nucleic acid
aaugcgggggaggaaacucccuucaaggacaucguccgggauggcugu

SEQ ID NO: 8794 - RNA, 48 nt, Artificial Sequence
  Description of Artificial Sequence:  Enzymatic Nucleic acid
agcuaaugggaggaaacucccuucaaggacaucguccggggggcaugg

SEQ ID NO: 8795 - RNA, 48 nt, Artificial Sequence
  Description of Artificial Sequence:  Enzymatic Nucleic acid
ucuaagagggaggaaacucccuucaaggacaucguccggguaaugcgg

SEQ ID NO: 8796 - RNA, 48 nt, Artificial Sequence
  Description of Artificial Sequence:  Enzymatic Nucleic acid
cuguggguggaggaaacucccuucaaggacaucguccggguaagagcu

SEQ ID NO: 8797 - RNA, 48 nt, Artificial Sequence
  Description of Artificial Sequence:  Enzymatic Nucleic acid
aaaccaguggaggaaacucccuucaaggacaucguccggguguggguc

SEQ ID NO: 8798 - RNA, 48 nt, Artificial Sequence
  Description of Artificial Sequence:  Enzymatic Nucleic acid
ugcaaaacggaggaaacucccuucaaggacaucguccgggagucugug

SEQ ID NO: 8799 - RNA, 48 nt, Artificial Sequence
  Description of Artificial Sequence:  Enzymatic Nucleic acid
uugcaaaaggaggaaacucccuucaaggacaucguccgggcagucugu

SEQ ID NO: 8800 - RNA, 48 nt, Artificial Sequence
  Description of Artificial Sequence:  Enzymatic Nucleic acid
aaacguugggaggaaacucccuucaaggacaucguccgggaaaaccag

SEQ ID NO: 8801 - RNA, 48 nt, Artificial Sequence
  Description of Artificial Sequence:  Enzymatic Nucleic acid
gguguaaaggaggaaacucccuucaaggacaucguccgggguugcaaa

SEQ ID NO: 8802 - RNA, 48 nt, Artificial Sequence
  Description of Artificial Sequence:  Enzymatic Nucleic acid
uggcuaguggaggaaacucccuucaaggacaucguccggggguguaaa

SEQ ID NO: 8803 - RNA, 48 nt, Artificial Sequence
  Description of Artificial Sequence:  Enzymatic Nucleic acid
cuuccuggggaggaaacucccuucaaggacaucguccggguagucggu

SEQ ID NO: 8804 - RNA, 48 nt, Artificial Sequence
  Description of Artificial Sequence:  Enzymatic Nucleic acid
aguacuucggaggaaacucccuucaaggacaucguccggguggcuagu

SEQ ID NO: 8805 - RNA, 48 nt, Artificial Sequence
  Description of Artificial Sequence:  Enzymatic Nucleic acid
aaguacuuggaggaaacucccuucaaggacaucguccgggcuggcuag

SEQ ID NO: 8806 - RNA, 48 nt, Artificial Sequence
  Description of Artificial Sequence:  Enzymatic Nucleic acid
uggaaguaggaggaaacucccuucaaggacaucguccggguuccuggc

SEQ ID NO: 8807 - RNA, 48 nt, Artificial Sequence
  Description of Artificial Sequence:  Enzymatic Nucleic acid
aaugugccggaggaaacucccuucaaggacaucguccggggaggugga

SEQ ID NO: 8808 - RNA, 48 nt, Artificial Sequence
  Description of Artificial Sequence:  Enzymatic Nucleic acid
aaaugugcggaggaaacucccuucaaggacaucguccgggcgaggugg

SEQ ID NO: 8809 - RNA, 48 nt, Artificial Sequence
  Description of Artificial Sequence:  Enzymatic Nucleic acid
aaaaugugggaggaaacucccuucaaggacaucguccgggccgaggug

SEQ ID NO: 8810 - RNA, 48 nt, Artificial Sequence
  Description of Artificial Sequence:  Enzymatic Nucleic acid
caacuuccggaggaaacucccuucaaggacaucguccgggaaaaugug

SEQ ID NO: 8811 - RNA, 48 nt, Artificial Sequence
  Description of Artificial Sequence:  Enzymatic Nucleic acid
gcaacuucggaggaaacucccuucaaggacaucguccgggcaaaaugu

SEQ ID NO: 8812 - RNA, 48 nt, Artificial Sequence
  Description of Artificial Sequence:  Enzymatic Nucleic acid
ugcaacuuggaggaaacucccuucaaggacaucguccgggccaaaaug

SEQ ID NO: 8813 - RNA, 48 nt, Artificial Sequence
  Description of Artificial Sequence:  Enzymatic Nucleic acid
gaaugcaaggaggaaacucccuucaaggacaucguccggguucccaaa

SEQ ID NO: 8814 - RNA, 48 nt, Artificial Sequence
  Description of Artificial Sequence:  Enzymatic Nucleic acid
aaggaaugggaggaaacucccuucaaggacaucguccgggaacuuccc

SEQ ID NO: 8815 - RNA, 48 nt, Artificial Sequence
  Description of Artificial Sequence:  Enzymatic Nucleic acid
uuugaagaggaggaaacucccuucaaggacaucguccgggaaaggaau

SEQ ID NO: 8816 - RNA, 48 nt, Artificial Sequence
  Description of Artificial Sequence:  Enzymatic Nucleic acid
augcuucaggaggaaacucccuucaaggacaucguccgggaguuugaa

SEQ ID NO: 8817 - RNA, 48 nt, Artificial Sequence
  Description of Artificial Sequence:  Enzymatic Nucleic acid
aaaugcuuggaggaaacucccuucaaggacaucguccgggacaguuug

SEQ ID NO: 8818 - RNA, 48 nt, Artificial Sequence
  Description of Artificial Sequence:  Enzymatic Nucleic acid
uguaaaugggaggaaacucccuucaaggacaucguccggguucacagu

SEQ ID NO: 8819 - RNA, 48 nt, Artificial Sequence
  Description of Artificial Sequence:  Enzymatic Nucleic acid
augcguuuggaggaaacucccuucaaggacaucguccggguguaaaug

SEQ ID NO: 8820 - RNA, 48 nt, Artificial Sequence
  Description of Artificial Sequence:  Enzymatic Nucleic acid
gcuggaugggaggaaacucccuucaaggacaucguccgggguuucugu

SEQ ID NO: 8821 - RNA, 48 nt, Artificial Sequence
  Description of Artificial Sequence:  Enzymatic Nucleic acid
uauucuugggaggaaacucccuucaaggacaucguccggguggaugcg

SEQ ID NO: 8822 - RNA, 48 nt, Artificial Sequence
  Description of Artificial Sequence:  Enzymatic Nucleic acid
acaauauuggaggaaacucccuucaaggacaucguccggguugcugga

SEQ ID NO: 8823 - RNA, 48 nt, Artificial Sequence
  Description of Artificial Sequence:  Enzymatic Nucleic acid
caaagggaggaggaaacucccuucaaggacaucguccgggaauauucu

SEQ ID NO: 8824 - RNA, 48 nt, Artificial Sequence
  Description of Artificial Sequence:  Enzymatic Nucleic acid
uuucugcuggaggaaacucccuucaaggacaucguccgggaaagggac

SEQ ID NO: 8825 - RNA, 48 nt, Artificial Sequence
  Description of Artificial Sequence:  Enzymatic Nucleic acid
aauuucugggaggaaacucccuucaaggacaucguccgggucaaaggg

SEQ ID NO: 8826 - RNA, 48 nt, Artificial Sequence
  Description of Artificial Sequence:  Enzymatic Nucleic acid
auaaauuuggaggaaacucccuucaaggacaucguccgggugcucaaa

SEQ ID NO: 8827 - RNA, 48 nt, Artificial Sequence
  Description of Artificial Sequence:  Enzymatic Nucleic acid
auauaccuggaggaaacucccuucaaggacaucguccggguuugaaag

SEQ ID NO: 8828 - RNA, 48 nt, Artificial Sequence
  Description of Artificial Sequence:  Enzymatic Nucleic acid
aaauauacggaggaaacucccuucaaggacaucguccgggucuuugaa

SEQ ID NO: 8829 - RNA, 48 nt, Artificial Sequence
  Description of Artificial Sequence:  Enzymatic Nucleic acid
caaauauaggaggaaacucccuucaaggacaucguccgggcucuuuga

SEQ ID NO: 8830 - RNA, 48 nt, Artificial Sequence
  Description of Artificial Sequence:  Enzymatic Nucleic acid
uuuuuuuuggaggaaacucccuucaaggacaucguccgggaaauauac

SEQ ID NO: 8831 - RNA, 48 nt, Artificial Sequence
  Description of Artificial Sequence:  Enzymatic Nucleic acid
cacauauaggaggaaacucccuucaaggacaucguccggguuuuuuuu

SEQ ID NO: 8832 - RNA, 48 nt, Artificial Sequence
  Description of Artificial Sequence:  Enzymatic Nucleic acid
aauccucaggaggaaacucccuucaaggacaucguccgggauauacuu

SEQ ID NO: 8833 - RNA, 48 nt, Artificial Sequence
  Description of Artificial Sequence:  Enzymatic Nucleic acid
aaaauccuggaggaaacucccuucaaggacaucguccgggacauauac

SEQ ID NO: 8834 - RNA, 48 nt, Artificial Sequence
  Description of Artificial Sequence:  Enzymatic Nucleic acid
uaaaaaucggaggaaacucccuucaaggacaucguccgggucacauau

SEQ ID NO: 8835 - RNA, 48 nt, Artificial Sequence
  Description of Artificial Sequence:  Enzymatic Nucleic acid
auaaaaauggaggaaacucccuucaaggacaucguccgggcucacaua

SEQ ID NO: 8836 - RNA, 48 nt, Artificial Sequence
  Description of Artificial Sequence:  Enzymatic Nucleic acid
uccccaauggaggaaacucccuucaaggacaucguccgggaauaaaaa

SEQ ID NO: 8837 - RNA, 48 nt, Artificial Sequence
  Description of Artificial Sequence:  Enzymatic Nucleic acid
aagaucccggaggaaacucccuucaaggacaucguccgggaaucaaua

SEQ ID NO: 8838 - RNA, 48 nt, Artificial Sequence
  Description of Artificial Sequence:  Enzymatic Nucleic acid
caagauccggaggaaacucccuucaaggacaucguccgggcaaucaau

SEQ ID NO: 8839 - RNA, 48 nt, Artificial Sequence
  Description of Artificial Sequence:  Enzymatic Nucleic acid
ccaagaucggaggaaacucccuucaaggacaucguccgggccaaucaa

SEQ ID NO: 8840 - RNA, 48 nt, Artificial Sequence
  Description of Artificial Sequence:  Enzymatic Nucleic acid
uccaagauggaggaaacucccuucaaggacaucguccgggcccaauca

SEQ ID NO: 8841 - RNA, 48 nt, Artificial Sequence
  Description of Artificial Sequence:  Enzymatic Nucleic acid
aaaaacucggaggaaacucccuucaaggacaucguccgggaagauccc

SEQ ID NO: 8842 - RNA, 48 nt, Artificial Sequence
  Description of Artificial Sequence:  Enzymatic Nucleic acid
gaaaaacuggaggaaacucccuucaaggacaucguccgggcaagaucc

SEQ ID NO: 8843 - RNA, 48 nt, Artificial Sequence
  Description of Artificial Sequence:  Enzymatic Nucleic acid
augaaaaaggaggaaacucccuucaaggacaucguccggguccaagau

SEQ ID NO: 8844 - RNA, 48 nt, Artificial Sequence
  Description of Artificial Sequence:  Enzymatic Nucleic acid
aauagcgaggaggaaacucccuucaaggacaucguccgggaaugaaaa

SEQ ID NO: 8845 - RNA, 48 nt, Artificial Sequence
  Description of Artificial Sequence:  Enzymatic Nucleic acid
aucaauagggaggaaacucccuucaaggacaucguccggggacaauga

SEQ ID NO: 8846 - RNA, 48 nt, Artificial Sequence
  Description of Artificial Sequence:  Enzymatic Nucleic acid
guaaaaauggaggaaacucccuucaaggacaucguccgggaauagcga

SEQ ID NO: 8847 - RNA, 48 nt, Artificial Sequence
  Description of Artificial Sequence:  Enzymatic Nucleic acid
gaagagccggaggaaacucccuucaaggacaucguccgggauugaagu

SEQ ID NO: 8848 - RNA, 48 nt, Artificial Sequence
  Description of Artificial Sequence:  Enzymatic Nucleic acid
ggaagagcggaggaaacucccuucaaggacaucguccgggcauugaag

SEQ ID NO: 8849 - RNA, 48 nt, Artificial Sequence
  Description of Artificial Sequence:  Enzymatic Nucleic acid
uggaagagggaggaaacucccuucaaggacaucguccgggccauugaa

SEQ ID NO: 8850 - RNA, 48 nt, Artificial Sequence
  Description of Artificial Sequence:  Enzymatic Nucleic acid
gcuucuucggaggaaacucccuucaaggacaucguccggguuguugga

SEQ ID NO: 8851 - RNA, 48 nt, Artificial Sequence
  Description of Artificial Sequence:  Enzymatic Nucleic acid
agcuucuuggaggaaacucccuucaaggacaucguccgggcuuguugg

SEQ ID NO: 8852 - RNA, 48 nt, Artificial Sequence
  Description of Artificial Sequence:  Enzymatic Nucleic acid
gcaagcuuggaggaaacucccuucaaggacaucguccggguuccuugu

SEQ ID NO: 8853 - RNA, 48 nt, Artificial Sequence
  Description of Artificial Sequence:  Enzymatic Nucleic acid
ccagcaagggaggaaacucccuucaaggacaucguccggguucuuccu

SEQ ID NO: 8854 - RNA, 48 nt, Artificial Sequence
  Description of Artificial Sequence:  Enzymatic Nucleic acid
gcuaccagggaggaaacucccuucaaggacaucguccgggaagcuucu

SEQ ID NO: 8855 - RNA, 48 nt, Artificial Sequence
  Description of Artificial Sequence:  Enzymatic Nucleic acid
agugcuacggaggaaacucccuucaaggacaucguccgggagcaagcu

SEQ ID NO: 8856 - RNA, 48 nt, Artificial Sequence
  Description of Artificial Sequence:  Enzymatic Nucleic acid
aagugcuaggaggaaacucccuucaaggacaucguccgggcagcaagc

SEQ ID NO: 8857 - RNA, 48 nt, Artificial Sequence
  Description of Artificial Sequence:  Enzymatic Nucleic acid
agcaagugggaggaaacucccuucaaggacaucguccggguaccagca

SEQ ID NO: 8858 - RNA, 48 nt, Artificial Sequence
  Description of Artificial Sequence:  Enzymatic Nucleic acid
caggguagggaggaaacucccuucaaggacaucguccgggaagugcua

SEQ ID NO: 8859 - RNA, 48 nt, Artificial Sequence
  Description of Artificial Sequence:  Enzymatic Nucleic acid
gaugaacuggaggaaacucccuucaaggacaucguccgggaggguagc

SEQ ID NO: 8860 - RNA, 48 nt, Artificial Sequence
  Description of Artificial Sequence:  Enzymatic Nucleic acid
uggaugaaggaggaaacucccuucaaggacaucguccgggucagggua

SEQ ID NO: 8861 - RNA, 48 nt, Artificial Sequence
  Description of Artificial Sequence:  Enzymatic Nucleic acid
aguugggcggaggaaacucccuucaaggacaucguccggguggaugaa

SEQ ID NO: 8862 - RNA, 48 nt, Artificial Sequence
  Description of Artificial Sequence:  Enzymatic Nucleic acid
caguugggggaggaaacucccuucaaggacaucguccgggcuggauga

SEQ ID NO: 8863 - RNA, 48 nt, Artificial Sequence
  Description of Artificial Sequence:  Enzymatic Nucleic acid
cuugcucaggaggaaacucccuucaaggacaucguccgggaguugggc

SEQ ID NO: 8864 - RNA, 48 nt, Artificial Sequence
  Description of Artificial Sequence:  Enzymatic Nucleic acid
uccuugcuggaggaaacucccuucaaggacaucguccgggacaguugg

SEQ ID NO: 8865 - RNA, 48 nt, Artificial Sequence
  Description of Artificial Sequence:  Enzymatic Nucleic acid
gcuccuugggaggaaacucccuucaaggacaucguccgggucacaguu

SEQ ID NO: 8866 - RNA, 48 nt, Artificial Sequence
  Description of Artificial Sequence:  Enzymatic Nucleic acid
uugugcucggaggaaacucccuucaaggacaucguccggguugcucac

SEQ ID NO: 8867 - RNA, 48 nt, Artificial Sequence
  Description of Artificial Sequence:  Enzymatic Nucleic acid
cuugugcuggaggaaacucccuucaaggacaucguccgggcuugcuca

SEQ ID NO: 8868 - RNA, 48 nt, Artificial Sequence
  Description of Artificial Sequence:  Enzymatic Nucleic acid
ggcuugugggaggaaacucccuucaaggacaucguccggguccuugcu

SEQ ID NO: 8869 - RNA, 48 nt, Artificial Sequence
  Description of Artificial Sequence:  Enzymatic Nucleic acid
acuuguggggaggaaacucccuucaaggacaucguccggguugugcuc

SEQ ID NO: 8870 - RNA, 48 nt, Artificial Sequence
  Description of Artificial Sequence:  Enzymatic Nucleic acid
cuggaagaggaggaaacucccuucaaggacaucguccggguuguggcu

SEQ ID NO: 8871 - RNA, 48 nt, Artificial Sequence
  Description of Artificial Sequence:  Enzymatic Nucleic acid
agcauccuggaggaaacucccuucaaggacaucguccggguggaagac

SEQ ID NO: 8872 - RNA, 48 nt, Artificial Sequence
  Description of Artificial Sequence:  Enzymatic Nucleic acid
caagcaucggaggaaacucccuucaaggacaucguccgggucuggaag

SEQ ID NO: 8873 - RNA, 48 nt, Artificial Sequence
  Description of Artificial Sequence:  Enzymatic Nucleic acid
ucaagcauggaggaaacucccuucaaggacaucguccgggcucuggaa

SEQ ID NO: 8874 - RNA, 48 nt, Artificial Sequence
  Description of Artificial Sequence:  Enzymatic Nucleic acid
gaaucaagggaggaaacucccuucaaggacaucguccgggauccucug

SEQ ID NO: 8875 - RNA, 48 nt, Artificial Sequence
  Description of Artificial Sequence:  Enzymatic Nucleic acid
acuggaauggaggaaacucccuucaaggacaucguccgggaagcaucc

SEQ ID NO: 8876 - RNA, 48 nt, Artificial Sequence
  Description of Artificial Sequence:  Enzymatic Nucleic acid
cagaaccaggaggaaacucccuucaaggacaucguccggguggaauca

SEQ ID NO: 8877 - RNA, 48 nt, Artificial Sequence
  Description of Artificial Sequence:  Enzymatic Nucleic acid
agcagaacggaggaaacucccuucaaggacaucguccgggacuggaau

SEQ ID NO: 8878 - RNA, 48 nt, Artificial Sequence
  Description of Artificial Sequence:  Enzymatic Nucleic acid
aagcagaaggaggaaacucccuucaaggacaucguccgggcacuggaa

SEQ ID NO: 8879 - RNA, 48 nt, Artificial Sequence
  Description of Artificial Sequence:  Enzymatic Nucleic acid
ccuugaagggaggaaacucccuucaaggacaucguccgggagaaccac

SEQ ID NO: 8880 - RNA, 48 nt, Artificial Sequence
  Description of Artificial Sequence:  Enzymatic Nucleic acid
guggaagcggaggaaacucccuucaaggacaucguccggguugaagca

SEQ ID NO: 8881 - RNA, 48 nt, Artificial Sequence
  Description of Artificial Sequence:  Enzymatic Nucleic acid
aguggaagggaggaaacucccuucaaggacaucguccgggcuugaagc

SEQ ID NO: 8882 - RNA, 48 nt, Artificial Sequence
  Description of Artificial Sequence:  Enzymatic Nucleic acid
guguuuugggaggaaacucccuucaaggacaucguccgggaguggaag

SEQ ID NO: 8883 - RNA, 48 nt, Artificial Sequence
  Description of Artificial Sequence:  Enzymatic Nucleic acid
ucuuggauggaggaaacucccuucaaggacaucguccggguuuagugu

SEQ ID NO: 8884 - RNA, 48 nt, Artificial Sequence
  Description of Artificial Sequence:  Enzymatic Nucleic acid
aaggccuuggaggaaacucccuucaaggacaucguccggguuggaucu

SEQ ID NO: 8885 - RNA, 48 nt, Artificial Sequence
  Description of Artificial Sequence:  Enzymatic Nucleic acid
augaaggcggaggaaacucccuucaaggacaucguccggguucuugga

SEQ ID NO: 8886 - RNA, 48 nt, Artificial Sequence
  Description of Artificial Sequence:  Enzymatic Nucleic acid
caugaaggggaggaaacucccuucaaggacaucguccgggcuucuugg

SEQ ID NO: 8887 - RNA, 48 nt, Artificial Sequence
  Description of Artificial Sequence:  Enzymatic Nucleic acid
gcuggggcggaggaaacucccuucaaggacaucguccgggaugaaggc

SEQ ID NO: 8888 - RNA, 48 nt, Artificial Sequence
  Description of Artificial Sequence:  Enzymatic Nucleic acid
ugcuggggggaggaaacucccuucaaggacaucguccgggcaugaagg

SEQ ID NO: 8889 - RNA, 48 nt, Artificial Sequence
  Description of Artificial Sequence:  Enzymatic Nucleic acid
ccggccugggaggaaacucccuucaaggacaucguccggguggggcca

SEQ ID NO: 8890 - RNA, 48 nt, Artificial Sequence
  Description of Artificial Sequence:  Enzymatic Nucleic acid
gauccggcggaggaaacucccuucaaggacaucguccgggugcugggg

SEQ ID NO: 8891 - RNA, 48 nt, Artificial Sequence
  Description of Artificial Sequence:  Enzymatic Nucleic acid
cgauccggggaggaaacucccuucaaggacaucguccgggcugcuggg

SEQ ID NO: 8892 - RNA, 48 nt, Artificial Sequence
  Description of Artificial Sequence:  Enzymatic Nucleic acid
uaccgaucggaggaaacucccuucaaggacaucguccgggggccugcu

SEQ ID NO: 8893 - RNA, 48 nt, Artificial Sequence
  Description of Artificial Sequence:  Enzymatic Nucleic acid
guaccgauggaggaaacucccuucaaggacaucguccgggcggccugc

SEQ ID NO: 8894 - RNA, 48 nt, Artificial Sequence
  Description of Artificial Sequence:  Enzymatic Nucleic acid
uacaguacggaggaaacucccuucaaggacaucguccggggauccggc

SEQ ID NO: 8895 - RNA, 48 nt, Artificial Sequence
  Description of Artificial Sequence:  Enzymatic Nucleic acid
auacaguaggaggaaacucccuucaaggacaucguccgggcgauccgg

SEQ ID NO: 8896 - RNA, 48 nt, Artificial Sequence
  Description of Artificial Sequence:  Enzymatic Nucleic acid
acuugauaggaggaaacucccuucaaggacaucguccgggaguaccga

SEQ ID NO: 8897 - RNA, 48 nt, Artificial Sequence
  Description of Artificial Sequence:  Enzymatic Nucleic acid
ugccaugaggaggaaacucccuucaaggacaucguccggguugauaca

SEQ ID NO: 8898 - RNA, 48 nt, Artificial Sequence
  Description of Artificial Sequence:  Enzymatic Nucleic acid
guaccugcggaggaaacucccuucaaggacaucguccgggaugacuug

SEQ ID NO: 8899 - RNA, 48 nt, Artificial Sequence
  Description of Artificial Sequence:  Enzymatic Nucleic acid
uguaccugggaggaaacucccuucaaggacaucguccgggcaugacuu

SEQ ID NO: 8900 - RNA, 48 nt, Artificial Sequence
  Description of Artificial Sequence:  Enzymatic Nucleic acid
uacuguacggaggaaacucccuucaaggacaucguccgggugccauga

SEQ ID NO: 8901 - RNA, 48 nt, Artificial Sequence
  Description of Artificial Sequence:  Enzymatic Nucleic acid
cuacuguaggaggaaacucccuucaaggacaucguccgggcugccaug

SEQ ID NO: 8902 - RNA, 48 nt, Artificial Sequence
  Description of Artificial Sequence:  Enzymatic Nucleic acid
uuauccuaggaggaaacucccuucaaggacaucguccggguguaccug

SEQ ID NO: 8903 - RNA, 48 nt, Artificial Sequence
  Description of Artificial Sequence:  Enzymatic Nucleic acid
ggcuuaucggaggaaacucccuucaaggacaucguccggguacuguac

SEQ ID NO: 8904 - RNA, 48 nt, Artificial Sequence
  Description of Artificial Sequence:  Enzymatic Nucleic acid
uggcuuauggaggaaacucccuucaaggacaucguccgggcuacugua

SEQ ID NO: 8905 - RNA, 48 nt, Artificial Sequence
  Description of Artificial Sequence:  Enzymatic Nucleic acid
cagaguggggaggaaacucccuucaaggacaucguccggguuauccua

SEQ ID NO: 8906 - RNA, 48 nt, Artificial Sequence
  Description of Artificial Sequence:  Enzymatic Nucleic acid
ggaagggaggaggaaacucccuucaaggacaucguccgggagaguggc

SEQ ID NO: 8907 - RNA, 48 nt, Artificial Sequence
  Description of Artificial Sequence:  Enzymatic Nucleic acid
ucuuugccggaggaaacucccuucaaggacaucguccgggaggaaggg

SEQ ID NO: 8908 - RNA, 48 nt, Artificial Sequence
  Description of Artificial Sequence:  Enzymatic Nucleic acid
uucuuugcggaggaaacucccuucaaggacaucguccgggcaggaagg

SEQ ID NO: 8909 - RNA, 48 nt, Artificial Sequence
  Description of Artificial Sequence:  Enzymatic Nucleic acid
cuucuuugggaggaaacucccuucaaggacaucguccgggccaggaag

SEQ ID NO: 8910 - RNA, 48 nt, Artificial Sequence
  Description of Artificial Sequence:  Enzymatic Nucleic acid
cguuucuuggaggaaacucccuucaaggacaucguccggguuugccca

SEQ ID NO: 8911 - RNA, 48 nt, Artificial Sequence
  Description of Artificial Sequence:  Enzymatic Nucleic acid
cuccguuuggaggaaacucccuucaaggacaucguccggguucuuugc

SEQ ID NO: 8912 - RNA, 48 nt, Artificial Sequence
  Description of Artificial Sequence:  Enzymatic Nucleic acid
auccccucggaggaaacucccuucaaggacaucguccgggguuucuuc

SEQ ID NO: 8913 - RNA, 48 nt, Artificial Sequence
  Description of Artificial Sequence:  Enzymatic Nucleic acid
cauccccuggaggaaacucccuucaaggacaucguccgggcguuucuu

SEQ ID NO: 8914 - RNA, 48 nt, Artificial Sequence
  Description of Artificial Sequence:  Enzymatic Nucleic acid
uucaucccggaggaaacucccuucaaggacaucguccggguccguuuc

SEQ ID NO: 8915 - RNA, 48 nt, Artificial Sequence
  Description of Artificial Sequence:  Enzymatic Nucleic acid
auucauccggaggaaacucccuucaaggacaucguccgggcuccguuu

SEQ ID NO: 8916 - RNA, 48 nt, Artificial Sequence
  Description of Artificial Sequence:  Enzymatic Nucleic acid
aauucaucggaggaaacucccuucaaggacaucguccgggccuccguu

SEQ ID NO: 8917 - RNA, 48 nt, Artificial Sequence
  Description of Artificial Sequence:  Enzymatic Nucleic acid
gaauucauggaggaaacucccuucaaggacaucguccgggcccuccgu

SEQ ID NO: 8918 - RNA, 48 nt, Artificial Sequence
  Description of Artificial Sequence:  Enzymatic Nucleic acid
gaagaauuggaggaaacucccuucaaggacaucguccgggauccccuc

SEQ ID NO: 8919 - RNA, 48 nt, Artificial Sequence
  Description of Artificial Sequence:  Enzymatic Nucleic acid
aaguaaguggaggaaacucccuucaaggacaucguccggguaaggaag

SEQ ID NO: 8920 - RNA, 48 nt, Artificial Sequence
  Description of Artificial Sequence:  Enzymatic Nucleic acid
cauuuuuaggaggaaacucccuucaaggacaucguccgggaaaaguaa

SEQ ID NO: 8921 - RNA, 48 nt, Artificial Sequence
  Description of Artificial Sequence:  Enzymatic Nucleic acid
cguggggaggaggaaacucccuucaaggacaucguccgggauuuuuac

SEQ ID NO: 8922 - RNA, 48 nt, Artificial Sequence
  Description of Artificial Sequence:  Enzymatic Nucleic acid
guaaguacggaggaaacucccuucaaggacaucguccgggguggggac

SEQ ID NO: 8923 - RNA, 48 nt, Artificial Sequence
  Description of Artificial Sequence:  Enzymatic Nucleic acid
aguaaguaggaggaaacucccuucaaggacaucguccgggcgugggga

SEQ ID NO: 8924 - RNA, 48 nt, Artificial Sequence
  Description of Artificial Sequence:  Enzymatic Nucleic acid
ugguccauggaggaaacucccuucaaggacaucguccgggagugggga

SEQ ID NO: 8925 - RNA, 48 nt, Artificial Sequence
  Description of Artificial Sequence:  Enzymatic Nucleic acid
cacuggucggaggaaacucccuucaaggacaucguccgggaucagugg

SEQ ID NO: 8926 - RNA, 48 nt, Artificial Sequence
  Description of Artificial Sequence:  Enzymatic Nucleic acid
ccacugguggaggaaacucccuucaaggacaucguccgggcaucagug

SEQ ID NO: 8927 - RNA, 48 nt, Artificial Sequence
  Description of Artificial Sequence:  Enzymatic Nucleic acid
ggaaaccaggaggaaacucccuucaaggacaucguccgggugguccau

SEQ ID NO: 8928 - RNA, 48 nt, Artificial Sequence
  Description of Artificial Sequence:  Enzymatic Nucleic acid
cuggaaacggaggaaacucccuucaaggacaucguccgggacuggucc

SEQ ID NO: 8929 - RNA, 48 nt, Artificial Sequence
  Description of Artificial Sequence:  Enzymatic Nucleic acid
acuggaaaggaggaaacucccuucaaggacaucguccgggcacugguc

SEQ ID NO: 8930 - RNA, 48 nt, Artificial Sequence
  Description of Artificial Sequence:  Enzymatic Nucleic acid
gcucaugaggaggaaacucccuucaaggacaucguccggguggaaacc

SEQ ID NO: 8931 - RNA, 48 nt, Artificial Sequence
  Description of Artificial Sequence:  Enzymatic Nucleic acid
cuaacgcuggaggaaacucccuucaaggacaucguccgggaugacugg

SEQ ID NO: 8932 - RNA, 48 nt, Artificial Sequence
  Description of Artificial Sequence:  Enzymatic Nucleic acid
gucuaacgggaggaaacucccuucaaggacaucguccgggucaugacu

SEQ ID NO: 8933 - RNA, 48 nt, Artificial Sequence
  Description of Artificial Sequence:  Enzymatic Nucleic acid
cagucuaaggaggaaacucccuucaaggacaucguccggggcucauga

SEQ ID NO: 8934 - RNA, 48 nt, Artificial Sequence
  Description of Artificial Sequence:  Enzymatic Nucleic acid
aagucaguggaggaaacucccuucaaggacaucguccggguaacgcuc

SEQ ID NO: 8935 - RNA, 48 nt, Artificial Sequence
  Description of Artificial Sequence:  Enzymatic Nucleic acid
aaacaaguggaggaaacucccuucaaggacaucguccgggagucuaac

SEQ ID NO: 8936 - RNA, 48 nt, Artificial Sequence
  Description of Artificial Sequence:  Enzymatic Nucleic acid
aagacaaaggaggaaacucccuucaaggacaucguccgggaagucagu

SEQ ID NO: 8937 - RNA, 48 nt, Artificial Sequence
  Description of Artificial Sequence:  Enzymatic Nucleic acid
auggaagaggaggaaacucccuucaaggacaucguccgggaaacaagu

SEQ ID NO: 8938 - RNA, 48 nt, Artificial Sequence
  Description of Artificial Sequence:  Enzymatic Nucleic acid
uuucaaaaggaggaaacucccuucaaggacaucguccgggaauggaau

SEQ ID NO: 8939 - RNA, 48 nt, Artificial Sequence
  Description of Artificial Sequence:  Enzymatic Nucleic acid
cugaguuuggaggaaacucccuucaaggacaucguccgggaaaacaau

SEQ ID NO: 8940 - RNA, 48 nt, Artificial Sequence
  Description of Artificial Sequence:  Enzymatic Nucleic acid
gcggcauaggaggaaacucccuucaaggacaucguccgggugaguuuc

SEQ ID NO: 8941 - RNA, 48 nt, Artificial Sequence
  Description of Artificial Sequence:  Enzymatic Nucleic acid
aggggcggggaggaaacucccuucaaggacaucguccgggauacugag

SEQ ID NO: 8942 - RNA, 48 nt, Artificial Sequence
  Description of Artificial Sequence:  Enzymatic Nucleic acid
gacaggggggaggaaacucccuucaaggacaucguccgggggcauacu

SEQ ID NO: 8943 - RNA, 48 nt, Artificial Sequence
  Description of Artificial Sequence:  Enzymatic Nucleic acid
cagcaagaggaggaaacucccuucaaggacaucguccgggaggggcgg

SEQ ID NO: 8944 - RNA, 48 nt, Artificial Sequence
  Description of Artificial Sequence:  Enzymatic Nucleic acid
caugacagggaggaaacucccuucaaggacaucguccgggaagacagg

SEQ ID NO: 8945 - RNA, 48 nt, Artificial Sequence
  Description of Artificial Sequence:  Enzymatic Nucleic acid
uuucaugaggaggaaacucccuucaaggacaucguccgggagcaagac

SEQ ID NO: 8946 - RNA, 48 nt, Artificial Sequence
  Description of Artificial Sequence:  Enzymatic Nucleic acid
gcugauuuggaggaaacucccuucaaggacaucguccgggaugacagc

SEQ ID NO: 8947 - RNA, 48 nt, Artificial Sequence
  Description of Artificial Sequence:  Enzymatic Nucleic acid
cucucuugggaggaaacucccuucaaggacaucguccgggugauuuca

SEQ ID NO: 8948 - RNA, 48 nt, Artificial Sequence
  Description of Artificial Sequence:  Enzymatic Nucleic acid
cauccucuggaggaaacucccuucaaggacaucguccggguugcugau

SEQ ID NO: 8949 - RNA, 48 nt, Artificial Sequence
  Description of Artificial Sequence:  Enzymatic Nucleic acid
gucauccuggaggaaacucccuucaaggacaucguccgggucuugcug

SEQ ID NO: 8950 - RNA, 48 nt, Artificial Sequence
  Description of Artificial Sequence:  Enzymatic Nucleic acid
gugucaucggaggaaacucccuucaaggacaucguccgggucucuugc

SEQ ID NO: 8951 - RNA, 48 nt, Artificial Sequence
  Description of Artificial Sequence:  Enzymatic Nucleic acid
ugugucauggaggaaacucccuucaaggacaucguccgggcucucuug

SEQ ID NO: 8952 - RNA, 48 nt, Artificial Sequence
  Description of Artificial Sequence:  Enzymatic Nucleic acid
ugauguguggaggaaacucccuucaaggacaucguccgggauccucuc

SEQ ID NO: 8953 - RNA, 48 nt, Artificial Sequence
  Description of Artificial Sequence:  Enzymatic Nucleic acid
cuggaaucggaggaaacucccuucaaggacaucguccggggaguuauu

SEQ ID NO: 8954 - RNA, 48 nt, Artificial Sequence
  Description of Artificial Sequence:  Enzymatic Nucleic acid
gcuggaauggaggaaacucccuucaaggacaucguccgggcgaguuau

SEQ ID NO: 8955 - RNA, 48 nt, Artificial Sequence
  Description of Artificial Sequence:  Enzymatic Nucleic acid
aaugugggggaggaaacucccuucaaggacaucguccggguggaaucc

SEQ ID NO: 8956 - RNA, 48 nt, Artificial Sequence
  Description of Artificial Sequence:  Enzymatic Nucleic acid
gaugaaucggaggaaacucccuucaaggacaucguccgggaauguggg

SEQ ID NO: 8957 - RNA, 48 nt, Artificial Sequence
  Description of Artificial Sequence:  Enzymatic Nucleic acid
ugaugaauggaggaaacucccuucaaggacaucguccgggcaaugugg

SEQ ID NO: 8958 - RNA, 48 nt, Artificial Sequence
  Description of Artificial Sequence:  Enzymatic Nucleic acid
uccaaaugggaggaaacucccuucaaggacaucguccgggugaugaau

SEQ ID NO: 8959 - RNA, 48 nt, Artificial Sequence
  Description of Artificial Sequence:  Enzymatic Nucleic acid
uauuggucggaggaaacucccuucaaggacaucguccgggaaaugcug

SEQ ID NO: 8960 - RNA, 48 nt, Artificial Sequence
  Description of Artificial Sequence:  Enzymatic Nucleic acid
cuauugguggaggaaacucccuucaaggacaucguccgggcaaaugcu

SEQ ID NO: 8961 - RNA, 48 nt, Artificial Sequence
  Description of Artificial Sequence:  Enzymatic Nucleic acid
gcugugggggaggaaacucccuucaaggacaucguccggguauugguc

SEQ ID NO: 8962 - RNA, 48 nt, Artificial Sequence
  Description of Artificial Sequence:  Enzymatic Nucleic acid
auucucagggaggaaacucccuucaaggacaucguccgggugugggcu

SEQ ID NO: 8963 - RNA, 48 nt, Artificial Sequence
  Description of Artificial Sequence:  Enzymatic Nucleic acid
cacauucuggaggaaacucccuucaaggacaucguccgggagcugugg

SEQ ID NO: 8964 - RNA, 48 nt, Artificial Sequence
  Description of Artificial Sequence:  Enzymatic Nucleic acid
uccacauuggaggaaacucccuucaaggacaucguccgggucagcugu

SEQ ID NO: 8965 - RNA, 48 nt, Artificial Sequence
  Description of Artificial Sequence:  Enzymatic Nucleic acid
guauuccaggaggaaacucccuucaaggacaucguccgggauucucag

SEQ ID NO: 8966 - RNA, 48 nt, Artificial Sequence
  Description of Artificial Sequence:  Enzymatic Nucleic acid
agguauucggaggaaacucccuucaaggacaucguccgggacauucuc

SEQ ID NO: 8967 - RNA, 48 nt, Artificial Sequence
  Description of Artificial Sequence:  Enzymatic Nucleic acid
uagguauuggaggaaacucccuucaaggacaucguccgggcacauucu

SEQ ID NO: 8968 - RNA, 48 nt, Artificial Sequence
  Description of Artificial Sequence:  Enzymatic Nucleic acid
guguuaucggaggaaacucccuucaaggacaucguccggguuagguau

SEQ ID NO: 8969 - RNA, 48 nt, Artificial Sequence
  Description of Artificial Sequence:  Enzymatic Nucleic acid
gguguuauggaggaaacucccuucaaggacaucguccgggcuuaggua

SEQ ID NO: 8970 - RNA, 48 nt, Artificial Sequence
  Description of Artificial Sequence:  Enzymatic Nucleic acid
aacaaaagggaggaaacucccuucaaggacaucguccggggguguuau

SEQ ID NO: 8971 - RNA, 48 nt, Artificial Sequence
  Description of Artificial Sequence:  Enzymatic Nucleic acid
ugcgagaaggaggaaacucccuucaaggacaucguccgggaaaagcgg

SEQ ID NO: 8972 - RNA, 48 nt, Artificial Sequence
  Description of Artificial Sequence:  Enzymatic Nucleic acid
cguuuuugggaggaaacucccuucaaggacaucguccggggagaacaa

SEQ ID NO: 8973 - RNA, 48 nt, Artificial Sequence
  Description of Artificial Sequence:  Enzymatic Nucleic acid
aggagauaggaggaaacucccuucaaggacaucguccgggguuuuugc

SEQ ID NO: 8974 - RNA, 48 nt, Artificial Sequence
  Description of Artificial Sequence:  Enzymatic Nucleic acid
cugagccuggaggaaacucccuucaaggacaucguccgggaaauuagg

SEQ ID NO: 8975 - RNA, 48 nt, Artificial Sequence
  Description of Artificial Sequence:  Enzymatic Nucleic acid
aucugagcggaggaaacucccuucaaggacaucguccgggucaaauua

SEQ ID NO: 8976 - RNA, 48 nt, Artificial Sequence
  Description of Artificial Sequence:  Enzymatic Nucleic acid
caucugagggaggaaacucccuucaaggacaucguccgggcucaaauu

SEQ ID NO: 8977 - RNA, 48 nt, Artificial Sequence
  Description of Artificial Sequence:  Enzymatic Nucleic acid
cauuucauggaggaaacucccuucaaggacaucguccgggugagccuc

SEQ ID NO: 8978 - RNA, 48 nt, Artificial Sequence
  Description of Artificial Sequence:  Enzymatic Nucleic acid
augcauuuggaggaaacucccuucaaggacaucguccgggaucugagc

SEQ ID NO: 8979 - RNA, 48 nt, Artificial Sequence
  Description of Artificial Sequence:  Enzymatic Nucleic acid
accugaugggaggaaacucccuucaaggacaucguccgggauuucauc

SEQ ID NO: 8980 - RNA, 48 nt, Artificial Sequence
  Description of Artificial Sequence:  Enzymatic Nucleic acid
caaaggacggaggaaacucccuucaaggacaucguccgggugaugcau

SEQ ID NO: 8981 - RNA, 48 nt, Artificial Sequence
  Description of Artificial Sequence:  Enzymatic Nucleic acid
ccaaaggaggaggaaacucccuucaaggacaucguccgggcugaugca

SEQ ID NO: 8982 - RNA, 48 nt, Artificial Sequence
  Description of Artificial Sequence:  Enzymatic Nucleic acid
cuaugcccggaggaaacucccuucaaggacaucguccgggaaaggacc

SEQ ID NO: 8983 - RNA, 48 nt, Artificial Sequence
  Description of Artificial Sequence:  Enzymatic Nucleic acid
ucuaugccggaggaaacucccuucaaggacaucguccgggcaaaggac

SEQ ID NO: 8984 - RNA, 48 nt, Artificial Sequence
  Description of Artificial Sequence:  Enzymatic Nucleic acid
aucuaugcggaggaaacucccuucaaggacaucguccgggccaaagga

SEQ ID NO: 8985 - RNA, 48 nt, Artificial Sequence
  Description of Artificial Sequence:  Enzymatic Nucleic acid
gaucuaugggaggaaacucccuucaaggacaucguccgggcccaaagg

SEQ ID NO: 8986 - RNA, 48 nt, Artificial Sequence
  Description of Artificial Sequence:  Enzymatic Nucleic acid
cuucugauggaggaaacucccuucaaggacaucguccggguaugcccc

SEQ ID NO: 8987 - RNA, 48 nt, Artificial Sequence
  Description of Artificial Sequence:  Enzymatic Nucleic acid
guagucuuggaggaaacucccuucaaggacaucguccgggugaucuau

SEQ ID NO: 8988 - RNA, 48 nt, Artificial Sequence
  Description of Artificial Sequence:  Enzymatic Nucleic acid
uuuguaguggaggaaacucccuucaaggacaucguccggguucugauc

SEQ ID NO: 8989 - RNA, 48 nt, Artificial Sequence
  Description of Artificial Sequence:  Enzymatic Nucleic acid
agcagcuuggaggaaacucccuucaaggacaucguccgggauuuuugu

SEQ ID NO: 8990 - RNA, 48 nt, Artificial Sequence
  Description of Artificial Sequence:  Enzymatic Nucleic acid
cagagcagggaggaaacucccuucaaggacaucguccggguucauuuu

SEQ ID NO: 8991 - RNA, 48 nt, Artificial Sequence
  Description of Artificial Sequence:  Enzymatic Nucleic acid
uuucagagggaggaaacucccuucaaggacaucguccgggagcuucau

SEQ ID NO: 8992 - RNA, 48 nt, Artificial Sequence
  Description of Artificial Sequence:  Enzymatic Nucleic acid
ggagauuuggaggaaacucccuucaaggacaucguccgggagagcagc

SEQ ID NO: 8993 - RNA, 48 nt, Artificial Sequence
  Description of Artificial Sequence:  Enzymatic Nucleic acid
ggugauggggaggaaacucccuucaaggacaucguccggguaaaggag

SEQ ID NO: 8994 - RNA, 48 nt, Artificial Sequence
  Description of Artificial Sequence:  Enzymatic Nucleic acid
aacacaaaggaggaaacucccuucaaggacaucguccggguaauuuug

SEQ ID NO: 8995 - RNA, 48 nt, Artificial Sequence
  Description of Artificial Sequence:  Enzymatic Nucleic acid
aaguaacaggaggaaacucccuucaaggacaucguccgggaaacuaau

SEQ ID NO: 8996 - RNA, 48 nt, Artificial Sequence
  Description of Artificial Sequence:  Enzymatic Nucleic acid
auaaguaaggaggaaacucccuucaaggacaucguccgggacaaacua

SEQ ID NO: 8997 - RNA, 48 nt, Artificial Sequence
  Description of Artificial Sequence:  Enzymatic Nucleic acid
cuaucuucggaggaaacucccuucaaggacaucguccgggauaaguaa

SEQ ID NO: 8998 - RNA, 48 nt, Artificial Sequence
  Description of Artificial Sequence:  Enzymatic Nucleic acid
acuaucuuggaggaaacucccuucaaggacaucguccgggcauaagua

SEQ ID NO: 8999 - RNA, 48 nt, Artificial Sequence
  Description of Artificial Sequence:  Enzymatic Nucleic acid
aaaacuauggaggaaacucccuucaaggacaucguccggguuccauaa

SEQ ID NO: 9000 - RNA, 48 nt, Artificial Sequence
  Description of Artificial Sequence:  Enzymatic Nucleic acid
ggagaaaaggaggaaacucccuucaaggacaucguccggguaucuucc

SEQ ID NO: 9001 - RNA, 48 nt, Artificial Sequence
  Description of Artificial Sequence:  Enzymatic Nucleic acid
guaaaaagggaggaaacucccuucaaggacaucguccggguuuugaag

SEQ ID NO: 9002 - RNA, 48 nt, Artificial Sequence
  Description of Artificial Sequence:  Enzymatic Nucleic acid
cauauacuggaggaaacucccuucaaggacaucguccggguuugagua

SEQ ID NO: 9003 - RNA, 48 nt, Artificial Sequence
  Description of Artificial Sequence:  Enzymatic Nucleic acid
aacauauaggaggaaacucccuucaaggacaucguccgggucuuugag

SEQ ID NO: 9004 - RNA, 48 nt, Artificial Sequence
  Description of Artificial Sequence:  Enzymatic Nucleic acid
ggagggaaggaggaaacucccuucaaggacaucguccgggauauacuc

SEQ ID NO: 9005 - RNA, 48 nt, Artificial Sequence
  Description of Artificial Sequence:  Enzymatic Nucleic acid
cagcugacggaggaaacucccuucaaggacaucguccggguggaggga

SEQ ID NO: 9006 - RNA, 48 nt, Artificial Sequence
  Description of Artificial Sequence:  Enzymatic Nucleic acid
gcagcugaggaggaaacucccuucaaggacaucguccgggcuggaggg

SEQ ID NO: 9007 - RNA, 48 nt, Artificial Sequence
  Description of Artificial Sequence:  Enzymatic Nucleic acid
gggggcagggaggaaacucccuucaaggacaucguccgggugaccugg

SEQ ID NO: 9008 - RNA, 48 nt, Artificial Sequence
  Description of Artificial Sequence:  Enzymatic Nucleic acid
uuugggggggaggaaacucccuucaaggacaucguccgggagcugacc

SEQ ID NO: 9009 - RNA, 48 nt, Artificial Sequence
  Description of Artificial Sequence:  Enzymatic Nucleic acid
ugacaaagggaggaaacucccuucaaggacaucguccgggguaaggag

SEQ ID NO: 9010 - RNA, 48 nt, Artificial Sequence
  Description of Artificial Sequence:  Enzymatic Nucleic acid
uugugugaggaggaaacucccuucaaggacaucguccgggaaagcgua

SEQ ID NO: 9011 - RNA, 48 nt, Artificial Sequence
  Description of Artificial Sequence:  Enzymatic Nucleic acid
cagagacaggaggaaacucccuucaaggacaucguccggguuuuugug

SEQ ID NO: 9012 - RNA, 48 nt, Artificial Sequence
  Description of Artificial Sequence:  Enzymatic Nucleic acid
ggcagagaggaggaaacucccuucaaggacaucguccgggacuuuuug

SEQ ID NO: 9013 - RNA, 48 nt, Artificial Sequence
  Description of Artificial Sequence:  Enzymatic Nucleic acid
acucaaggggaggaaacucccuucaaggacaucguccgggagagacac

SEQ ID NO: 9014 - RNA, 48 nt, Artificial Sequence
  Description of Artificial Sequence:  Enzymatic Nucleic acid
agaugacuggaggaaacucccuucaaggacaucguccgggaaggcaga

SEQ ID NO: 9015 - RNA, 48 nt, Artificial Sequence
  Description of Artificial Sequence:  Enzymatic Nucleic acid
auagaugaggaggaaacucccuucaaggacaucguccgggucaaggca

SEQ ID NO: 9016 - RNA, 48 nt, Artificial Sequence
  Description of Artificial Sequence:  Enzymatic Nucleic acid
uguaagugggaggaaacucccuucaaggacaucguccggguugaauag

SEQ ID NO: 9017 - RNA, 48 nt, Artificial Sequence
  Description of Artificial Sequence:  Enzymatic Nucleic acid
ggccagagggaggaaacucccuucaaggacaucguccggguguaagug

SEQ ID NO: 9018 - RNA, 48 nt, Artificial Sequence
  Description of Artificial Sequence:  Enzymatic Nucleic acid
guuguggcggaggaaacucccuucaaggacaucguccgggagagcugu

SEQ ID NO: 9019 - RNA, 48 nt, Artificial Sequence
  Description of Artificial Sequence:  Enzymatic Nucleic acid
uguuguggggaggaaacucccuucaaggacaucguccgggcagagcug

SEQ ID NO: 9020 - RNA, 48 nt, Artificial Sequence
  Description of Artificial Sequence:  Enzymatic Nucleic acid
aaaaugccggaggaaacucccuucaaggacaucguccggguguugugg

SEQ ID NO: 9021 - RNA, 48 nt, Artificial Sequence
  Description of Artificial Sequence:  Enzymatic Nucleic acid
uaaaaugcggaggaaacucccuucaaggacaucguccgggcuguugug

SEQ ID NO: 9022 - RNA, 48 nt, Artificial Sequence
  Description of Artificial Sequence:  Enzymatic Nucleic acid
guaaaaugggaggaaacucccuucaaggacaucguccgggccuguugu

SEQ ID NO: 9023 - RNA, 48 nt, Artificial Sequence
  Description of Artificial Sequence:  Enzymatic Nucleic acid
auucgcacggaggaaacucccuucaaggacaucguccggguguaaaau

SEQ ID NO: 9024 - RNA, 48 nt, Artificial Sequence
  Description of Artificial Sequence:  Enzymatic Nucleic acid
cauucgcaggaggaaacucccuucaaggacaucguccgggcuguaaaa

SEQ ID NO: 9025 - RNA, 48 nt, Artificial Sequence
  Description of Artificial Sequence:  Enzymatic Nucleic acid
gucauucgggaggaaacucccuucaaggacaucguccgggaccuguaa

SEQ ID NO: 9026 - RNA, 48 nt, Artificial Sequence
  Description of Artificial Sequence:  Enzymatic Nucleic acid
cugucauuggaggaaacucccuucaaggacaucguccggggcaccugu

SEQ ID NO: 9027 - RNA, 48 nt, Artificial Sequence
  Description of Artificial Sequence:  Enzymatic Nucleic acid
gcuacuguggaggaaacucccuucaaggacaucguccgggauucgcac

SEQ ID NO: 9028 - RNA, 48 nt, Artificial Sequence
  Description of Artificial Sequence:  Enzymatic Nucleic acid
uaaugcuaggaggaaacucccuucaaggacaucguccgggugucauuc

SEQ ID NO: 9029 - RNA, 48 nt, Artificial Sequence
  Description of Artificial Sequence:  Enzymatic Nucleic acid
ucauaaugggaggaaacucccuucaaggacaucguccggguacuguca

SEQ ID NO: 9030 - RNA, 48 nt, Artificial Sequence
  Description of Artificial Sequence:  Enzymatic Nucleic acid
acacuacuggaggaaacucccuucaaggacaucguccgggauaaugcu

SEQ ID NO: 9031 - RNA, 48 nt, Artificial Sequence
  Description of Artificial Sequence:  Enzymatic Nucleic acid
ucacacuaggaggaaacucccuucaaggacaucguccgggucauaaug

SEQ ID NO: 9032 - RNA, 48 nt, Artificial Sequence
  Description of Artificial Sequence:  Enzymatic Nucleic acid
aauucacaggaggaaacucccuucaaggacaucguccggguacucaua

SEQ ID NO: 9033 - RNA, 48 nt, Artificial Sequence
  Description of Artificial Sequence:  Enzymatic Nucleic acid
ugaauucaggaggaaacucccuucaaggacaucguccgggacuacuca

SEQ ID NO: 9034 - RNA, 48 nt, Artificial Sequence
  Description of Artificial Sequence:  Enzymatic Nucleic acid
ccugaauuggaggaaacucccuucaaggacaucguccgggacacuacu

SEQ ID NO: 9035 - RNA, 48 nt, Artificial Sequence
  Description of Artificial Sequence:  Enzymatic Nucleic acid
uuuacuacggaggaaacucccuucaaggacaucguccgggugaauuca

SEQ ID NO: 9036 - RNA, 48 nt, Artificial Sequence
  Description of Artificial Sequence:  Enzymatic Nucleic acid
auuuacuaggaggaaacucccuucaaggacaucguccgggcugaauuc

SEQ ID NO: 9037 - RNA, 48 nt, Artificial Sequence
  Description of Artificial Sequence:  Enzymatic Nucleic acid
cauauuuaggaggaaacucccuucaaggacaucguccggguaccugaa

SEQ ID NO: 9038 - RNA, 48 nt, Artificial Sequence
  Description of Artificial Sequence:  Enzymatic Nucleic acid
ccuaguuuggaggaaacucccuucaaggacaucguccgggauauuuac

SEQ ID NO: 9039 - RNA, 48 nt, Artificial Sequence
  Description of Artificial Sequence:  Enzymatic Nucleic acid
uucaaaccggaggaaacucccuucaaggacaucguccggguaguuuca

SEQ ID NO: 9040 - RNA, 48 nt, Artificial Sequence
  Description of Artificial Sequence:  Enzymatic Nucleic acid
uuucaaacggaggaaacucccuucaaggacaucguccgggcuaguuuc

SEQ ID NO: 9041 - RNA, 48 nt, Artificial Sequence
  Description of Artificial Sequence:  Enzymatic Nucleic acid
auuucaaaggaggaaacucccuucaaggacaucguccgggccuaguuu

SEQ ID NO: 9042 - RNA, 48 nt, Artificial Sequence
  Description of Artificial Sequence:  Enzymatic Nucleic acid
aucaauuuggaggaaacucccuucaaggacaucguccgggaaacccua

SEQ ID NO: 9043 - RNA, 48 nt, Artificial Sequence
  Description of Artificial Sequence:  Enzymatic Nucleic acid
agcauuauggaggaaacucccuucaaggacaucguccgggaauuucaa

SEQ ID NO: 9044 - RNA, 48 nt, Artificial Sequence
  Description of Artificial Sequence:  Enzymatic Nucleic acid
ugugaaagggaggaaacucccuucaaggacaucguccgggauuaucaa

SEQ ID NO: 9045 - RNA, 48 nt, Artificial Sequence
  Description of Artificial Sequence:  Enzymatic Nucleic acid
aacaucugggaggaaacucccuucaaggacaucguccgggaaauguug

SEQ ID NO: 9046 - RNA, 48 nt, Artificial Sequence
  Description of Artificial Sequence:  Enzymatic Nucleic acid
uaaaacauggaggaaacucccuucaaggacaucguccgggugcaaaug

SEQ ID NO: 9047 - RNA, 48 nt, Artificial Sequence
  Description of Artificial Sequence:  Enzymatic Nucleic acid
uucuaaaaggaggaaacucccuucaaggacaucguccgggaucugcaa

SEQ ID NO: 9048 - RNA, 48 nt, Artificial Sequence
  Description of Artificial Sequence:  Enzymatic Nucleic acid
uuuuccuuggaggaaacucccuucaaggacaucguccggguaaaacau

SEQ ID NO: 9049 - RNA, 48 nt, Artificial Sequence
  Description of Artificial Sequence:  Enzymatic Nucleic acid
cuuuuuucggaggaaacucccuucaaggacaucguccggguucuaaaa

SEQ ID NO: 9050 - RNA, 48 nt, Artificial Sequence
  Description of Artificial Sequence:  Enzymatic Nucleic acid
acuuuuuuggaggaaacucccuucaaggacaucguccgggcuucuaaa

SEQ ID NO: 9051 - RNA, 48 nt, Artificial Sequence
  Description of Artificial Sequence:  Enzymatic Nucleic acid
ggaaggaaggaggaaacucccuucaaggacaucguccggguuuuuucc

SEQ ID NO: 9052 - RNA, 48 nt, Artificial Sequence
  Description of Artificial Sequence:  Enzymatic Nucleic acid
caaucuucggaggaaacucccuucaaggacaucguccgggaauuguag

SEQ ID NO: 9053 - RNA, 48 nt, Artificial Sequence
  Description of Artificial Sequence:  Enzymatic Nucleic acid
ccaaucuuggaggaaacucccuucaaggacaucguccgggcaauugua

SEQ ID NO: 9054 - RNA, 48 nt, Artificial Sequence
  Description of Artificial Sequence:  Enzymatic Nucleic acid
cuuccaauggaggaaacucccuucaaggacaucguccggguuccaauu

SEQ ID NO: 9055 - RNA, 48 nt, Artificial Sequence
  Description of Artificial Sequence:  Enzymatic Nucleic acid
gaaucuucggaggaaacucccuucaaggacaucguccgggaaucuucc

SEQ ID NO: 9056 - RNA, 48 nt, Artificial Sequence
  Description of Artificial Sequence:  Enzymatic Nucleic acid
ugaaucuuggaggaaacucccuucaaggacaucguccgggcaaucuuc

SEQ ID NO: 9057 - RNA, 48 nt, Artificial Sequence
  Description of Artificial Sequence:  Enzymatic Nucleic acid
agcugaauggaggaaacucccuucaaggacaucguccggguuccaauc

SEQ ID NO: 9058 - RNA, 48 nt, Artificial Sequence
  Description of Artificial Sequence:  Enzymatic Nucleic acid
cuaacuagggaggaaacucccuucaaggacaucguccgggugaaucuu

SEQ ID NO: 9059 - RNA, 48 nt, Artificial Sequence
  Description of Artificial Sequence:  Enzymatic Nucleic acid
gcuccuaaggaggaaacucccuucaaggacaucguccggguagcugaa

SEQ ID NO: 9060 - RNA, 48 nt, Artificial Sequence
  Description of Artificial Sequence:  Enzymatic Nucleic acid
augggcucggaggaaacucccuucaaggacaucguccggguaacuagc

SEQ ID NO: 9061 - RNA, 48 nt, Artificial Sequence
  Description of Artificial Sequence:  Enzymatic Nucleic acid
aaugggcuggaggaaacucccuucaaggacaucguccgggcuaacuag

SEQ ID NO: 9062 - RNA, 48 nt, Artificial Sequence
  Description of Artificial Sequence:  Enzymatic Nucleic acid
aaaaugggggaggaaacucccuucaaggacaucguccggguccuaacu

SEQ ID NO: 9063 - RNA, 48 nt, Artificial Sequence
  Description of Artificial Sequence:  Enzymatic Nucleic acid
ggcacacaggaggaaacucccuucaaggacaucguccgggagauuagg

SEQ ID NO: 9064 - RNA, 48 nt, Artificial Sequence
  Description of Artificial Sequence:  Enzymatic Nucleic acid
agggcacaggaggaaacucccuucaaggacaucguccgggacagauua

SEQ ID NO: 9065 - RNA, 48 nt, Artificial Sequence
  Description of Artificial Sequence:  Enzymatic Nucleic acid
acagggcaggaggaaacucccuucaaggacaucguccgggacacagau

SEQ ID NO: 9066 - RNA, 48 nt, Artificial Sequence
  Description of Artificial Sequence:  Enzymatic Nucleic acid
uuacagggggaggaaacucccuucaaggacaucguccgggacacacag

SEQ ID NO: 9067 - RNA, 48 nt, Artificial Sequence
  Description of Artificial Sequence:  Enzymatic Nucleic acid
ucagguuaggaggaaacucccuucaaggacaucguccgggagggcaca

SEQ ID NO: 9068 - RNA, 48 nt, Artificial Sequence
  Description of Artificial Sequence:  Enzymatic Nucleic acid
uaaccaguggaggaaacucccuucaaggacaucguccgggagguuaca

SEQ ID NO: 9069 - RNA, 48 nt, Artificial Sequence
  Description of Artificial Sequence:  Enzymatic Nucleic acid
cuguuaacggaggaaacucccuucaaggacaucguccgggagucaggu

SEQ ID NO: 9070 - RNA, 48 nt, Artificial Sequence
  Description of Artificial Sequence:  Enzymatic Nucleic acid
gcuguuaaggaggaaacucccuucaaggacaucguccgggcagucagg

SEQ ID NO: 9071 - RNA, 48 nt, Artificial Sequence
  Description of Artificial Sequence:  Enzymatic Nucleic acid
aaggacugggaggaaacucccuucaaggacaucguccggguguuaacc

SEQ ID NO: 9072 - RNA, 48 nt, Artificial Sequence
  Description of Artificial Sequence:  Enzymatic Nucleic acid
acaaaggaggaggaaacucccuucaaggacaucguccgggugcuguua

SEQ ID NO: 9073 - RNA, 48 nt, Artificial Sequence
  Description of Artificial Sequence:  Enzymatic Nucleic acid
acuguuuaggaggaaacucccuucaaggacaucguccgggaaaggacu

SEQ ID NO: 9074 - RNA, 48 nt, Artificial Sequence
  Description of Artificial Sequence:  Enzymatic Nucleic acid
uuaaaacaggaggaaacucccuucaaggacaucguccggguguuuaca

SEQ ID NO: 9075 - RNA, 48 nt, Artificial Sequence
  Description of Artificial Sequence:  Enzymatic Nucleic acid
guuuaaaaggaggaaacucccuucaaggacaucguccgggacuguuua

SEQ ID NO: 9076 - RNA, 48 nt, Artificial Sequence
  Description of Artificial Sequence:  Enzymatic Nucleic acid
gauauugaggaggaaacucccuucaaggacaucguccggguaggagag

SEQ ID NO: 9077 - RNA, 48 nt, Artificial Sequence
  Description of Artificial Sequence:  Enzymatic Nucleic acid
auuucuucggaggaaacucccuucaaggacaucguccggguugauaaa

SEQ ID NO: 9078 - RNA, 48 nt, Artificial Sequence
  Description of Artificial Sequence:  Enzymatic Nucleic acid
cauuucuuggaggaaacucccuucaaggacaucguccgggcuugauaa

SEQ ID NO: 9079 - RNA, 48 nt, Artificial Sequence
  Description of Artificial Sequence:  Enzymatic Nucleic acid
aaccauuuggaggaaacucccuucaaggacaucguccggguuccuuga

SEQ ID NO: 9080 - RNA, 48 nt, Artificial Sequence
  Description of Artificial Sequence:  Enzymatic Nucleic acid
uucugaacggaggaaacucccuucaaggacaucguccgggauuucuuc

SEQ ID NO: 9081 - RNA, 48 nt, Artificial Sequence
  Description of Artificial Sequence:  Enzymatic Nucleic acid
uuucugaaggaggaaacucccuucaaggacaucguccgggcauuucuu

SEQ ID NO: 9082 - RNA, 48 nt, Artificial Sequence
  Description of Artificial Sequence:  Enzymatic Nucleic acid
aauauuuuggaggaaacucccuucaaggacaucguccgggugaaccau

SEQ ID NO: 9083 - RNA, 48 nt, Artificial Sequence
  Description of Artificial Sequence:  Enzymatic Nucleic acid
acuguaggggaggaaacucccuucaaggacaucguccgggugaaaaua

SEQ ID NO: 9084 - RNA, 48 nt, Artificial Sequence
  Description of Artificial Sequence:  Enzymatic Nucleic acid
gaacauaaggaggaaacucccuucaaggacaucguccggguguaggcu

SEQ ID NO: 9085 - RNA, 48 nt, Artificial Sequence
  Description of Artificial Sequence:  Enzymatic Nucleic acid
ugacugaaggaggaaacucccuucaaggacaucguccgggauaacugu

SEQ ID NO: 9086 - RNA, 48 nt, Artificial Sequence
  Description of Artificial Sequence:  Enzymatic Nucleic acid
gugugugaggaggaaacucccuucaaggacaucguccgggugaacaua

SEQ ID NO: 9087 - RNA, 48 nt, Artificial Sequence
  Description of Artificial Sequence:  Enzymatic Nucleic acid
aaaaggaaggaggaaacucccuucaaggacaucguccgggauuuugua

SEQ ID NO: 9088 - RNA, 48 nt, Artificial Sequence
  Description of Artificial Sequence:  Enzymatic Nucleic acid
uuuaaaagggaggaaacucccuucaaggacaucguccgggaaaaggaa

SEQ ID NO: 9089 - RNA, 48 nt, Artificial Sequence
  Description of Artificial Sequence:  Enzymatic Nucleic acid
aaaaauuaggaggaaacucccuucaaggacaucguccggguuuaaaag

SEQ ID NO: 9090 - RNA, 48 nt, Artificial Sequence
  Description of Artificial Sequence:  Enzymatic Nucleic acid
cugggaguggaggaaacucccuucaaggacaucguccgggaaaaauua

SEQ ID NO: 9091 - RNA, 48 nt, Artificial Sequence
  Description of Artificial Sequence:  Enzymatic Nucleic acid
ugacugauggaggaaacucccuucaaggacaucguccgggugggaguc

SEQ ID NO: 9092 - RNA, 48 nt, Artificial Sequence
  Description of Artificial Sequence:  Enzymatic Nucleic acid
ggcucugaggaggaaacucccuucaaggacaucguccgggugaucugg

SEQ ID NO: 9093 - RNA, 48 nt, Artificial Sequence
  Description of Artificial Sequence:  Enzymatic Nucleic acid
uaggggcuggaggaaacucccuucaaggacaucguccgggugacugau

SEQ ID NO: 9094 - RNA, 48 nt, Artificial Sequence
  Description of Artificial Sequence:  Enzymatic Nucleic acid
uguaggggggaggaaacucccuucaaggacaucguccgggucugacug

SEQ ID NO: 9095 - RNA, 48 nt, Artificial Sequence
  Description of Artificial Sequence:  Enzymatic Nucleic acid
uaacaaugggaggaaacucccuucaaggacaucguccggguguagggg

SEQ ID NO: 9096 - RNA, 48 nt, Artificial Sequence
  Description of Artificial Sequence:  Enzymatic Nucleic acid
uuucuuaaggaggaaacucccuucaaggacaucguccgggaaugcugu

SEQ ID NO: 9097 - RNA, 48 nt, Artificial Sequence
  Description of Artificial Sequence:  Enzymatic Nucleic acid
aauacuuuggaggaaacucccuucaaggacaucguccggguuaacaau

SEQ ID NO: 9098 - RNA, 48 nt, Artificial Sequence
  Description of Artificial Sequence:  Enzymatic Nucleic acid
aucaaauaggaggaaacucccuucaaggacaucguccggguuucuuaa

SEQ ID NO: 9099 - RNA, 48 nt, Artificial Sequence
  Description of Artificial Sequence:  Enzymatic Nucleic acid
acaaaaauggaggaaacucccuucaaggacaucguccgggaaauacuu

SEQ ID NO: 9100 - RNA, 48 nt, Artificial Sequence
  Description of Artificial Sequence:  Enzymatic Nucleic acid
cauugagaggaggaaacucccuucaaggacaucguccgggaaaaauca

SEQ ID NO: 9101 - RNA, 48 nt, Artificial Sequence
  Description of Artificial Sequence:  Enzymatic Nucleic acid
uuuauuuuggaggaaacucccuucaaggacaucguccgggauugagac

SEQ ID NO: 9102 - RNA, 15 nt, Artificial Sequence
  Description of Artificial Sequence:  Enzymatic Nucleic acid
guccaguauugaucg

SEQ ID NO: 9103 - RNA, 15 nt, Artificial Sequence
  Description of Artificial Sequence:  Enzymatic Nucleic acid
uagcagucuuaucua

SEQ ID NO: 9104 - RNA, 15 nt, Artificial Sequence
  Description of Artificial Sequence:  Enzymatic Nucleic acid
acauagucagcagug

SEQ ID NO: 9105 - RNA, 15 nt, Artificial Sequence
  Description of Artificial Sequence:  Enzymatic Nucleic acid
caaguguaagaagug

SEQ ID NO: 9106 - RNA, 15 nt, Artificial Sequence
  Description of Artificial Sequence:  Enzymatic Nucleic acid
aauagguauugguga

SEQ ID NO: 9107 - RNA, 15 nt, Artificial Sequence
  Description of Artificial Sequence:  Enzymatic Nucleic acid
uggaaguacgcagac

SEQ ID NO: 9108 - RNA, 15 nt, Artificial Sequence
  Description of Artificial Sequence:  Enzymatic Nucleic acid
accuugucauucagg

SEQ ID NO: 9109 - RNA, 15 nt, Artificial Sequence
  Description of Artificial Sequence:  Enzymatic Nucleic acid
aaagaguauauuuga

SEQ ID NO: 9110 - RNA, 15 nt, Artificial Sequence
  Description of Artificial Sequence:  Enzymatic Nucleic acid
ucauugucgcuauug

SEQ ID NO: 9111 - RNA, 15 nt, Artificial Sequence
  Description of Artificial Sequence:  Enzymatic Nucleic acid
cacaagucuuccaga

SEQ ID NO: 9112 - RNA, 15 nt, Artificial Sequence
  Description of Artificial Sequence:  Enzymatic Nucleic acid
aucaagucauggcag

SEQ ID NO: 9113 - RNA, 15 nt, Artificial Sequence
  Description of Artificial Sequence:  Enzymatic Nucleic acid
ggcagguacaguagg

SEQ ID NO: 9114 - RNA, 15 nt, Artificial Sequence
  Description of Artificial Sequence:  Enzymatic Nucleic acid
guacaguaggauaag

SEQ ID NO: 9115 - RNA, 15 nt, Artificial Sequence
  Description of Artificial Sequence:  Enzymatic Nucleic acid
cuuuuguaaaaaugu

SEQ ID NO: 9116 - RNA, 15 nt, Artificial Sequence
  Description of Artificial Sequence:  Enzymatic Nucleic acid
ccacgguacuuacuc

SEQ ID NO: 9117 - RNA, 15 nt, Artificial Sequence
  Description of Artificial Sequence:  Enzymatic Nucleic acid
aucagguccuuuggg

SEQ ID NO: 9118 - RNA, 15 nt, Artificial Sequence
  Description of Artificial Sequence:  Enzymatic Nucleic acid
aaagaguauauguuc

SEQ ID NO: 9119 - RNA, 15 nt, Artificial Sequence
  Description of Artificial Sequence:  Enzymatic Nucleic acid
aaagugucucugccu

SEQ ID NO: 9120 - RNA, 15 nt, Artificial Sequence
  Description of Artificial Sequence:  Enzymatic Nucleic acid
uucagguaguaaaua

SEQ ID NO: 9121 - RNA, 15 nt, Artificial Sequence
  Description of Artificial Sequence:  Enzymatic Nucleic acid
guucagucacacaca

SEQ ID NO: 9122 - RNA, 23 nt, Artificial Sequence
  Description of Artificial Sequence:  Enzymatic Nucleic acid
agcagcagcagcagcagcagcag

SEQ ID NO: 9123 - RNA, 15 nt, Artificial Sequence
  Description of Artificial Sequence:  Enzymatic Nucleic acid
cagcgaugcgacccu

SEQ ID NO: 9124 - RNA, 13 nt, Artificial Sequence
  Description of Artificial Sequence:  Enzymatic Nucleic acid
ucaaguggauggc

SEQ ID NO: 9125 - RNA, 13 nt, Artificial Sequence
  Description of Artificial Sequence:  Enzymatic Nucleic acid
ccaccagagugau

SEQ ID NO: 9126 - RNA, 13 nt, Artificial Sequence
  Description of Artificial Sequence:  Enzymatic Nucleic acid
accagagugaugu

SEQ ID NO: 9127 - RNA, 13 nt, Artificial Sequence
  Description of Artificial Sequence:  Enzymatic Nucleic acid
cuacaugaucaug

SEQ ID NO: 9128 - RNA, 15 nt, Artificial Sequence
  Description of Artificial Sequence:  Enzymatic Nucleic acid
ucuacaugaucaugg

SEQ ID NO: 9129 - RNA, 13 nt, Artificial Sequence
  Description of Artificial Sequence:  Enzymatic Nucleic acid
cagcagggcuucu

SEQ ID NO: 9130 - RNA, 13 nt, Artificial Sequence
  Description of Artificial Sequence:  Enzymatic Nucleic acid
agcagggcuucuu

SEQ ID NO: 9131 - RNA, 15 nt, Artificial Sequence
  Description of Artificial Sequence:  Enzymatic Nucleic acid
gacgacaggccaccu

SEQ ID NO: 9132 - RNA, 15 nt, Artificial Sequence
  Description of Artificial Sequence:  Enzymatic Nucleic acid
gggcucuggaggaaa

SEQ ID NO: 9133 - RNA, 15 nt, Artificial Sequence
  Description of Artificial Sequence:  Enzymatic Nucleic acid
ccggacugaaggagc

SEQ ID NO: 9134 - RNA, 15 nt, Artificial Sequence
  Description of Artificial Sequence:  Enzymatic Nucleic acid
gacugaaggagcugc

SEQ ID NO: 9135 - RNA, 15 nt, Artificial Sequence
  Description of Artificial Sequence:  Enzymatic Nucleic acid
acugaaggagcugcc

SEQ ID NO: 9136 - RNA, 15 nt, Artificial Sequence
  Description of Artificial Sequence:  Enzymatic Nucleic acid
gggugcaggagagga

SEQ ID NO: 9137 - RNA, 15 nt, Artificial Sequence
  Description of Artificial Sequence:  Enzymatic Nucleic acid
ugcaggagaggagaa

SEQ ID NO: 9138 - RNA, 15 nt, Artificial Sequence
  Description of Artificial Sequence:  Enzymatic Nucleic acid
gagaggagaacugcc

SEQ ID NO: 9139 - RNA, 15 nt, Artificial Sequence
  Description of Artificial Sequence:  Enzymatic Nucleic acid
ugagauggaggaaga

SEQ ID NO: 9140 - RNA, 15 nt, Artificial Sequence
  Description of Artificial Sequence:  Enzymatic Nucleic acid
ucuugcagucgucag

SEQ ID NO: 9141 - RNA, 15 nt, Artificial Sequence
  Description of Artificial Sequence:  Enzymatic Nucleic acid
cugcacaggacgggg

SEQ ID NO: 9142 - RNA, 15 nt, Artificial Sequence
  Description of Artificial Sequence:  Enzymatic Nucleic acid
gggaccagacaacug

SEQ ID NO: 9143 - RNA, 15 nt, Artificial Sequence
  Description of Artificial Sequence:  Enzymatic Nucleic acid
ugcaggagagggagc

SEQ ID NO: 9144 - RNA, 15 nt, Artificial Sequence
  Description of Artificial Sequence:  Enzymatic Nucleic acid
acuuggaggaccguc

SEQ ID NO: 9145 - RNA, 15 nt, Artificial Sequence
  Description of Artificial Sequence:  Enzymatic Nucleic acid
gggaguugaugaccu

SEQ ID NO: 9146 - RNA, 15 nt, Artificial Sequence
  Description of Artificial Sequence:  Enzymatic Nucleic acid
cagcauagacgacac

SEQ ID NO: 9147 - RNA, 15 nt, Artificial Sequence
  Description of Artificial Sequence:  Enzymatic Nucleic acid
ccuaagggucgcgcc

SEQ ID NO: 9148 - RNA, 15 nt, Artificial Sequence
  Description of Artificial Sequence:  Enzymatic Nucleic acid
ggagcaugaccacgg

SEQ ID NO: 9149 - RNA, 15 nt, Artificial Sequence
  Description of Artificial Sequence:  Enzymatic Nucleic acid
cauuguaggccacgc

SEQ ID NO: 9150 - RNA, 15 nt, Artificial Sequence
  Description of Artificial Sequence:  Enzymatic Nucleic acid
cgcaacuggcuguac

SEQ ID NO: 9151 - RNA, 13 nt, Artificial Sequence
  Description of Artificial Sequence:  Enzymatic Nucleic acid
augucuacaugau

SEQ ID NO: 9152 - RNA, 15 nt, Artificial Sequence
  Description of Artificial Sequence:  Enzymatic Nucleic acid
gaugucuacaugauc

SEQ ID NO: 9153 - RNA, 13 nt, Artificial Sequence
  Description of Artificial Sequence:  Enzymatic Nucleic acid
caugaucaugguc

SEQ ID NO: 9154 - RNA, 15 nt, Artificial Sequence
  Description of Artificial Sequence:  Enzymatic Nucleic acid
acaugaucaugguca

SEQ ID NO: 9155 - RNA, 15 nt, Artificial Sequence
  Description of Artificial Sequence:  Enzymatic Nucleic acid
accucgucggcgucc

SEQ ID NO: 9156 - RNA, 13 nt, Artificial Sequence
  Description of Artificial Sequence:  Enzymatic Nucleic acid
cgggcucuggagg

SEQ ID NO: 9157 - RNA, 15 nt, Artificial Sequence
  Description of Artificial Sequence:  Enzymatic Nucleic acid
ggcugguuauguccu

SEQ ID NO: 9158 - RNA, 15 nt, Artificial Sequence
  Description of Artificial Sequence:  Enzymatic Nucleic acid
gcugguuauguccuc

SEQ ID NO: 9159 - RNA, 15 nt, Artificial Sequence
  Description of Artificial Sequence:  Enzymatic Nucleic acid
auguccucauugccc

SEQ ID NO: 9160 - RNA, 13 nt, Artificial Sequence
  Description of Artificial Sequence:  Enzymatic Nucleic acid
cccacucaugcuc

SEQ ID NO: 9161 - RNA, 15 nt, Artificial Sequence
  Description of Artificial Sequence:  Enzymatic Nucleic acid
ucaugcucuacaacc

SEQ ID NO: 9162 - RNA, 13 nt, Artificial Sequence
  Description of Artificial Sequence:  Enzymatic Nucleic acid
guguguaacggaa

SEQ ID NO: 9163 - RNA, 15 nt, Artificial Sequence
  Description of Artificial Sequence:  Enzymatic Nucleic acid
acggaauagguauug

SEQ ID NO: 9164 - RNA, 13 nt, Artificial Sequence
  Description of Artificial Sequence:  Enzymatic Nucleic acid
acuccuucacaca

SEQ ID NO: 9165 - RNA, 15 nt, Artificial Sequence
  Description of Artificial Sequence:  Enzymatic Nucleic acid
cacacauacuccucc

SEQ ID NO: 9166 - RNA, 15 nt, Artificial Sequence
  Description of Artificial Sequence:  Enzymatic Nucleic acid
acauacuccuccucu

SEQ ID NO: 9167 - RNA, 15 nt, Artificial Sequence
  Description of Artificial Sequence:  Enzymatic Nucleic acid
agaaccuagaaauca

SEQ ID NO: 9168 - RNA, 15 nt, Artificial Sequence
  Description of Artificial Sequence:  Enzymatic Nucleic acid
uuucucuugcagucg

SEQ ID NO: 9169 - RNA, 13 nt, Artificial Sequence
  Description of Artificial Sequence:  Enzymatic Nucleic acid
ugcagucgucagc

SEQ ID NO: 9170 - RNA, 13 nt, Artificial Sequence
  Description of Artificial Sequence:  Enzymatic Nucleic acid
acuguuugggacc

SEQ ID NO: 9171 - RNA, 15 nt, Artificial Sequence
  Description of Artificial Sequence:  Enzymatic Nucleic acid
gggaguuuguggaga

SEQ ID NO: 9172 - RNA, 15 nt, Artificial Sequence
  Description of Artificial Sequence:  Enzymatic Nucleic acid
acuacauugacggcc

SEQ ID NO: 9173 - RNA, 15 nt, Artificial Sequence
  Description of Artificial Sequence:  Enzymatic Nucleic acid
gccacaucguucgga

SEQ ID NO: 9174 - RNA, 15 nt, Artificial Sequence
  Description of Artificial Sequence:  Enzymatic Nucleic acid
gccucuuacacccag

SEQ ID NO: 9175 - RNA, 15 nt, Artificial Sequence
  Description of Artificial Sequence:  Enzymatic Nucleic acid
aggaucuugaaggaa

SEQ ID NO: 9176 - RNA, 15 nt, Artificial Sequence
  Description of Artificial Sequence:  Enzymatic Nucleic acid
acgguguauaaggga

SEQ ID NO: 9177 - RNA, 15 nt, Artificial Sequence
  Description of Artificial Sequence:  Enzymatic Nucleic acid
gguguauaagggacu

SEQ ID NO: 9178 - RNA, 15 nt, Artificial Sequence
  Description of Artificial Sequence:  Enzymatic Nucleic acid
cgucgcuaucaagga

SEQ ID NO: 9179 - RNA, 15 nt, Artificial Sequence
  Description of Artificial Sequence:  Enzymatic Nucleic acid
agacaauauuggcuc

SEQ ID NO: 9180 - RNA, 15 nt, Artificial Sequence
  Description of Artificial Sequence:  Enzymatic Nucleic acid
ucccaguaccugcuc

SEQ ID NO: 9181 - RNA, 15 nt, Artificial Sequence
  Description of Artificial Sequence:  Enzymatic Nucleic acid
augaacuacuuggag

SEQ ID NO: 9182 - RNA, 13 nt, Artificial Sequence
  Description of Artificial Sequence:  Enzymatic Nucleic acid
acuacuuggagga

SEQ ID NO: 9183 - RNA, 15 nt, Artificial Sequence
  Description of Artificial Sequence:  Enzymatic Nucleic acid
agaaucuauacccac

SEQ ID NO: 9184 - RNA, 15 nt, Artificial Sequence
  Description of Artificial Sequence:  Enzymatic Nucleic acid
ugaccuuuggaucca

SEQ ID NO: 9185 - RNA, 15 nt, Artificial Sequence
  Description of Artificial Sequence:  Enzymatic Nucleic acid
gccaaguccuacaga

SEQ ID NO: 9186 - RNA, 15 nt, Artificial Sequence
  Description of Artificial Sequence:  Enzymatic Nucleic acid
aguaccucaucccac

SEQ ID NO: 9187 - RNA, 15 nt, Artificial Sequence
  Description of Artificial Sequence:  Enzymatic Nucleic acid
acaccuuccucccag

SEQ ID NO: 9188 - RNA, 13 nt, Artificial Sequence
  Description of Artificial Sequence:  Enzymatic Nucleic acid
accaguccguucc

SEQ ID NO: 9189 - RNA, 13 nt, Artificial Sequence
  Description of Artificial Sequence:  Enzymatic Nucleic acid
guccguucccaaa

SEQ ID NO: 9190 - RNA, 13 nt, Artificial Sequence
  Description of Artificial Sequence:  Enzymatic Nucleic acid
cacacuaccagga

SEQ ID NO: 9191 - RNA, 15 nt, Artificial Sequence
  Description of Artificial Sequence:  Enzymatic Nucleic acid
gcacauucgacagcc

SEQ ID NO: 9192 - RNA, 15 nt, Artificial Sequence
  Description of Artificial Sequence:  Enzymatic Nucleic acid
gcagaauaccuaagg

SEQ ID NO: 9193 - RNA, 13 nt, Artificial Sequence
  Description of Artificial Sequence:  Enzymatic Nucleic acid
cugguuauguccu

SEQ ID NO: 9194 - RNA, 15 nt, Artificial Sequence
  Description of Artificial Sequence:  Enzymatic Nucleic acid
gaaguguccccguaa

SEQ ID NO: 9195 - RNA, 15 nt, Artificial Sequence
  Description of Artificial Sequence:  Enzymatic Nucleic acid
uacgaauauuaaaca

SEQ ID NO: 9196 - RNA, 13 nt, Artificial Sequence
  Description of Artificial Sequence:  Enzymatic Nucleic acid
acacauacuccuc

SEQ ID NO: 9197 - RNA, 13 nt, Artificial Sequence
  Description of Artificial Sequence:  Enzymatic Nucleic acid
acuccuccucugg

SEQ ID NO: 9198 - RNA, 15 nt, Artificial Sequence
  Description of Artificial Sequence:  Enzymatic Nucleic acid
guuuucucuugcagu

SEQ ID NO: 9199 - RNA, 15 nt, Artificial Sequence
  Description of Artificial Sequence:  Enzymatic Nucleic acid
ucaauuuuacacaga

SEQ ID NO: 9200 - RNA, 15 nt, Artificial Sequence
  Description of Artificial Sequence:  Enzymatic Nucleic acid
aauacauaaaccagu

SEQ ID NO: 9201 - RNA, 15 nt, Artificial Sequence
  Description of Artificial Sequence:  Enzymatic Nucleic acid
ugaauuuauuggagc

SEQ ID NO: 9202 - RNA, 13 nt, Artificial Sequence
  Description of Artificial Sequence:  Enzymatic Nucleic acid
gugguccuuggga

SEQ ID NO: 9203 - RNA, 13 nt, Artificial Sequence
  Description of Artificial Sequence:  Enzymatic Nucleic acid
ugcugcaggcugc

SEQ ID NO: 9204 - RNA, 13 nt, Artificial Sequence
  Description of Artificial Sequence:  Enzymatic Nucleic acid
cugggcaucugcc

SEQ ID NO: 9205 - RNA, 13 nt, Artificial Sequence
  Description of Artificial Sequence:  Enzymatic Nucleic acid
acccaccagagug

SEQ ID NO: 9206 - RNA, 15 nt, Artificial Sequence
  Description of Artificial Sequence:  Enzymatic Nucleic acid
acccaccagagugau

SEQ ID NO: 9207 - RNA, 13 nt, Artificial Sequence
  Description of Artificial Sequence:  Enzymatic Nucleic acid
gaugucuacauga

SEQ ID NO: 9208 - RNA, 13 nt, Artificial Sequence
  Description of Artificial Sequence:  Enzymatic Nucleic acid
gucuacaugauca

SEQ ID NO: 9209 - RNA, 13 nt, Artificial Sequence
  Description of Artificial Sequence:  Enzymatic Nucleic acid
augaucaugguca

SEQ ID NO: 9210 - RNA, 13 nt, Artificial Sequence
  Description of Artificial Sequence:  Enzymatic Nucleic acid
gacccccagcgcu

SEQ ID NO: 9211 - RNA, 15 nt, Artificial Sequence
  Description of Artificial Sequence:  Enzymatic Nucleic acid
uccguccaguauuga

SEQ ID NO: 9212 - RNA, 13 nt, Artificial Sequence
  Description of Artificial Sequence:  Enzymatic Nucleic acid
gggcucuggagga

SEQ ID NO: 9213 - RNA, 15 nt, Artificial Sequence
  Description of Artificial Sequence:  Enzymatic Nucleic acid
uguccucauugcccu

SEQ ID NO: 9214 - RNA, 15 nt, Artificial Sequence
  Description of Artificial Sequence:  Enzymatic Nucleic acid
ccucaacacagugga

SEQ ID NO: 9215 - RNA, 15 nt, Artificial Sequence
  Description of Artificial Sequence:  Enzymatic Nucleic acid
ucaacacaguggagc

SEQ ID NO: 9216 - RNA, 15 nt, Artificial Sequence
  Description of Artificial Sequence:  Enzymatic Nucleic acid
gcagaucaucagagg

SEQ ID NO: 9217 - RNA, 15 nt, Artificial Sequence
  Description of Artificial Sequence:  Enzymatic Nucleic acid
gcugcccaugagaaa

SEQ ID NO: 9218 - RNA, 15 nt, Artificial Sequence
  Description of Artificial Sequence:  Enzymatic Nucleic acid
guucagcaacaaccc

SEQ ID NO: 9219 - RNA, 15 nt, Artificial Sequence
  Description of Artificial Sequence:  Enzymatic Nucleic acid
ugggagcugcugggg

SEQ ID NO: 9220 - RNA, 15 nt, Artificial Sequence
  Description of Artificial Sequence:  Enzymatic Nucleic acid
ggggugcaggagagg

SEQ ID NO: 9221 - RNA, 15 nt, Artificial Sequence
  Description of Artificial Sequence:  Enzymatic Nucleic acid
caugcucuacaaccc

SEQ ID NO: 9222 - RNA, 15 nt, Artificial Sequence
  Description of Artificial Sequence:  Enzymatic Nucleic acid
guggggccgacagcu

SEQ ID NO: 9223 - RNA, 15 nt, Artificial Sequence
  Description of Artificial Sequence:  Enzymatic Nucleic acid
acugcaccuccauca

SEQ ID NO: 9224 - RNA, 15 nt, Artificial Sequence
  Description of Artificial Sequence:  Enzymatic Nucleic acid
ucuccacauccugcc

SEQ ID NO: 9225 - RNA, 15 nt, Artificial Sequence
  Description of Artificial Sequence:  Enzymatic Nucleic acid
gagaaccuagaaauc

SEQ ID NO: 9226 - RNA, 15 nt, Artificial Sequence
  Description of Artificial Sequence:  Enzymatic Nucleic acid
cucuugcagucguca

SEQ ID NO: 9227 - RNA, 15 nt, Artificial Sequence
  Description of Artificial Sequence:  Enzymatic Nucleic acid
gucagccugaacaua

SEQ ID NO: 9228 - RNA, 15 nt, Artificial Sequence
  Description of Artificial Sequence:  Enzymatic Nucleic acid
cgagggcugcugggg

SEQ ID NO: 9229 - RNA, 15 nt, Artificial Sequence
  Description of Artificial Sequence:  Enzymatic Nucleic acid
gugagccaagggagu

SEQ ID NO: 9230 - RNA, 15 nt, Artificial Sequence
  Description of Artificial Sequence:  Enzymatic Nucleic acid
cggggaccagacaac

SEQ ID NO: 9231 - RNA, 13 nt, Artificial Sequence
  Description of Artificial Sequence:  Enzymatic Nucleic acid
gggaccagacaac

SEQ ID NO: 9232 - RNA, 15 nt, Artificial Sequence
  Description of Artificial Sequence:  Enzymatic Nucleic acid
gccggccaugugugc

SEQ ID NO: 9233 - RNA, 15 nt, Artificial Sequence
  Description of Artificial Sequence:  Enzymatic Nucleic acid
gccucaccuccaccg

SEQ ID NO: 9234 - RNA, 15 nt, Artificial Sequence
  Description of Artificial Sequence:  Enzymatic Nucleic acid
ccuccaccgugcaac

SEQ ID NO: 9235 - RNA, 15 nt, Artificial Sequence
  Description of Artificial Sequence:  Enzymatic Nucleic acid
accgugcaacucauc

SEQ ID NO: 9236 - RNA, 15 nt, Artificial Sequence
  Description of Artificial Sequence:  Enzymatic Nucleic acid
gaacuacuuggagga

SEQ ID NO: 9237 - RNA, 15 nt, Artificial Sequence
  Description of Artificial Sequence:  Enzymatic Nucleic acid
ggaggaccgucgcuu

SEQ ID NO: 9238 - RNA, 15 nt, Artificial Sequence
  Description of Artificial Sequence:  Enzymatic Nucleic acid
cggaaucccugccag

SEQ ID NO: 9239 - RNA, 15 nt, Artificial Sequence
  Description of Artificial Sequence:  Enzymatic Nucleic acid
gagacccccagcgcu

SEQ ID NO: 9240 - RNA, 15 nt, Artificial Sequence
  Description of Artificial Sequence:  Enzymatic Nucleic acid
gcgcuaccuugucau

SEQ ID NO: 9241 - RNA, 15 nt, Artificial Sequence
  Description of Artificial Sequence:  Enzymatic Nucleic acid
cgcuaccuugucauu

SEQ ID NO: 9242 - RNA, 15 nt, Artificial Sequence
  Description of Artificial Sequence:  Enzymatic Nucleic acid
cgugcccugauggau

SEQ ID NO: 9243 - RNA, 15 nt, Artificial Sequence
  Description of Artificial Sequence:  Enzymatic Nucleic acid
guaccucaucccaca

SEQ ID NO: 9244 - RNA, 15 nt, Artificial Sequence
  Description of Artificial Sequence:  Enzymatic Nucleic acid
gacuccccuccugag

SEQ ID NO: 9245 - RNA, 15 nt, Artificial Sequence
  Description of Artificial Sequence:  Enzymatic Nucleic acid
caccuuccucccagu

SEQ ID NO: 9246 - RNA, 15 nt, Artificial Sequence
  Description of Artificial Sequence:  Enzymatic Nucleic acid
accuuccucccagug

SEQ ID NO: 9247 - RNA, 13 nt, Artificial Sequence
  Description of Artificial Sequence:  Enzymatic Nucleic acid
ccaguccguuccc

SEQ ID NO: 9248 - RNA, 15 nt, Artificial Sequence
  Description of Artificial Sequence:  Enzymatic Nucleic acid
cugaaccccgcgccc

SEQ ID NO: 9249 - RNA, 15 nt, Artificial Sequence
  Description of Artificial Sequence:  Enzymatic Nucleic acid
agagacccacacuac

SEQ ID NO: 9250 - RNA, 15 nt, Artificial Sequence
  Description of Artificial Sequence:  Enzymatic Nucleic acid
gagacccacacuacc

SEQ ID NO: 9251 - RNA, 13 nt, Artificial Sequence
  Description of Artificial Sequence:  Enzymatic Nucleic acid
acccacacuacca

SEQ ID NO: 9252 - RNA, 15 nt, Artificial Sequence
  Description of Artificial Sequence:  Enzymatic Nucleic acid
acacuaccaggaccc

SEQ ID NO: 9253 - RNA, 15 nt, Artificial Sequence
  Description of Artificial Sequence:  Enzymatic Nucleic acid
aggacccccacagca

SEQ ID NO: 9254 - RNA, 15 nt, Artificial Sequence
  Description of Artificial Sequence:  Enzymatic Nucleic acid
cagcagggcuucuuc

SEQ ID NO: 9255 - RNA, 13 nt, Artificial Sequence
  Description of Artificial Sequence:  Enzymatic Nucleic acid
ucccgagcuagcc

SEQ ID NO: 9256 - RNA, 13 nt, Artificial Sequence
  Description of Artificial Sequence:  Enzymatic Nucleic acid
cgccucgccgcca

SEQ ID NO: 9257 - RNA, 15 nt, Artificial Sequence
  Description of Artificial Sequence:  Enzymatic Nucleic acid
ccgccucgccgccaa

SEQ ID NO: 9258 - RNA, 15 nt, Artificial Sequence
  Description of Artificial Sequence:  Enzymatic Nucleic acid
ccucgccgccaacgc

SEQ ID NO: 9259 - RNA, 13 nt, Artificial Sequence
  Description of Artificial Sequence:  Enzymatic Nucleic acid
gacuccguccagu

SEQ ID NO: 9260 - RNA, 15 nt, Artificial Sequence
  Description of Artificial Sequence:  Enzymatic Nucleic acid
ugacuccguccagua

SEQ ID NO: 9261 - RNA, 15 nt, Artificial Sequence
  Description of Artificial Sequence:  Enzymatic Nucleic acid
caacacaguggagcg

SEQ ID NO: 9262 - RNA, 13 nt, Artificial Sequence
  Description of Artificial Sequence:  Enzymatic Nucleic acid
gaaggagcugccc

SEQ ID NO: 9263 - RNA, 15 nt, Artificial Sequence
  Description of Artificial Sequence:  Enzymatic Nucleic acid
ugaaggagcugccca

SEQ ID NO: 9264 - RNA, 15 nt, Artificial Sequence
  Description of Artificial Sequence:  Enzymatic Nucleic acid
gcaacaugucgaugg

SEQ ID NO: 9265 - RNA, 15 nt, Artificial Sequence
  Description of Artificial Sequence:  Enzymatic Nucleic acid
gggagcugcuggggu

SEQ ID NO: 9266 - RNA, 15 nt, Artificial Sequence
  Description of Artificial Sequence:  Enzymatic Nucleic acid
cgggagagcgacugc

SEQ ID NO: 9267 - RNA, 15 nt, Artificial Sequence
  Description of Artificial Sequence:  Enzymatic Nucleic acid
cacucaugcucuaca

SEQ ID NO: 9268 - RNA, 15 nt, Artificial Sequence
  Description of Artificial Sequence:  Enzymatic Nucleic acid
ccaccacguaccaga

SEQ ID NO: 9269 - RNA, 15 nt, Artificial Sequence
  Description of Artificial Sequence:  Enzymatic Nucleic acid
uucucuugcagucgu

SEQ ID NO: 9270 - RNA, 13 nt, Artificial Sequence
  Description of Artificial Sequence:  Enzymatic Nucleic acid
gcagucgucagcc

SEQ ID NO: 9271 - RNA, 15 nt, Artificial Sequence
  Description of Artificial Sequence:  Enzymatic Nucleic acid
ugcagucgucagccu

SEQ ID NO: 9272 - RNA, 15 nt, Artificial Sequence
  Description of Artificial Sequence:  Enzymatic Nucleic acid
accuccggucagaaa

SEQ ID NO: 9273 - RNA, 13 nt, Artificial Sequence
  Description of Artificial Sequence:  Enzymatic Nucleic acid
uggagggugagcc

SEQ ID NO: 9274 - RNA, 15 nt, Artificial Sequence
  Description of Artificial Sequence:  Enzymatic Nucleic acid
guauccagugugccc

SEQ ID NO: 9275 - RNA, 15 nt, Artificial Sequence
  Description of Artificial Sequence:  Enzymatic Nucleic acid
auccagugugcccac

SEQ ID NO: 9276 - RNA, 15 nt, Artificial Sequence
  Description of Artificial Sequence:  Enzymatic Nucleic acid
gccaugugugccacc

SEQ ID NO: 9277 - RNA, 15 nt, Artificial Sequence
  Description of Artificial Sequence:  Enzymatic Nucleic acid
gccaccugugccauc

SEQ ID NO: 9278 - RNA, 13 nt, Artificial Sequence
  Description of Artificial Sequence:  Enzymatic Nucleic acid
uccaccgugcaac

SEQ ID NO: 9279 - RNA, 15 nt, Artificial Sequence
  Description of Artificial Sequence:  Enzymatic Nucleic acid
cuccaccgugcaacu

SEQ ID NO: 9280 - RNA, 15 nt, Artificial Sequence
  Description of Artificial Sequence:  Enzymatic Nucleic acid
ccaccgugcaacuca

SEQ ID NO: 9281 - RNA, 15 nt, Artificial Sequence
  Description of Artificial Sequence:  Enzymatic Nucleic acid
gcucccaguaccugc

SEQ ID NO: 9282 - RNA, 15 nt, Artificial Sequence
  Description of Artificial Sequence:  Enzymatic Nucleic acid
aacuggugugugcag

SEQ ID NO: 9283 - RNA, 15 nt, Artificial Sequence
  Description of Artificial Sequence:  Enzymatic Nucleic acid
cuggugugugcagau

SEQ ID NO: 9284 - RNA, 15 nt, Artificial Sequence
  Description of Artificial Sequence:  Enzymatic Nucleic acid
gaggaccgucgcuug

SEQ ID NO: 9285 - RNA, 15 nt, Artificial Sequence
  Description of Artificial Sequence:  Enzymatic Nucleic acid
ccugccagcgagauc

SEQ ID NO: 9286 - RNA, 15 nt, Artificial Sequence
  Description of Artificial Sequence:  Enzymatic Nucleic acid
uggucaagugcugga

SEQ ID NO: 9287 - RNA, 15 nt, Artificial Sequence
  Description of Artificial Sequence:  Enzymatic Nucleic acid
gcagauagucgccca

SEQ ID NO: 9288 - RNA, 15 nt, Artificial Sequence
  Description of Artificial Sequence:  Enzymatic Nucleic acid
gcccaaaguuccgug

SEQ ID NO: 9289 - RNA, 15 nt, Artificial Sequence
  Description of Artificial Sequence:  Enzymatic Nucleic acid
cuaccuugucauuca

SEQ ID NO: 9290 - RNA, 15 nt, Artificial Sequence
  Description of Artificial Sequence:  Enzymatic Nucleic acid
uugccaaguccuaca

SEQ ID NO: 9291 - RNA, 15 nt, Artificial Sequence
  Description of Artificial Sequence:  Enzymatic Nucleic acid
uucuaccgugcccug

SEQ ID NO: 9292 - RNA, 15 nt, Artificial Sequence
  Description of Artificial Sequence:  Enzymatic Nucleic acid
ggacgacguggugga

SEQ ID NO: 9293 - RNA, 15 nt, Artificial Sequence
  Description of Artificial Sequence:  Enzymatic Nucleic acid
cuccugagcucucug

SEQ ID NO: 9294 - RNA, 15 nt, Artificial Sequence
  Description of Artificial Sequence:  Enzymatic Nucleic acid
ucucugagugcaacc

SEQ ID NO: 9295 - RNA, 15 nt, Artificial Sequence
  Description of Artificial Sequence:  Enzymatic Nucleic acid
cccacaggcgccuug

SEQ ID NO: 9296 - RNA, 15 nt, Artificial Sequence
  Description of Artificial Sequence:  Enzymatic Nucleic acid
ccucccagugccuga

SEQ ID NO: 9297 - RNA, 15 nt, Artificial Sequence
  Description of Artificial Sequence:  Enzymatic Nucleic acid
uaaaccaguccguuc

SEQ ID NO: 9298 - RNA, 13 nt, Artificial Sequence
  Description of Artificial Sequence:  Enzymatic Nucleic acid
caguccguuccca

SEQ ID NO: 9299 - RNA, 15 nt, Artificial Sequence
  Description of Artificial Sequence:  Enzymatic Nucleic acid
ccaguccguucccaa

SEQ ID NO: 9300 - RNA, 15 nt, Artificial Sequence
  Description of Artificial Sequence:  Enzymatic Nucleic acid
cccaccugugucaac

SEQ ID NO: 9301 - RNA, 15 nt, Artificial Sequence
  Description of Artificial Sequence:  Enzymatic Nucleic acid
aaaggcagccaccaa

SEQ ID NO: 9302 - RNA, 15 nt, Artificial Sequence
  Description of Artificial Sequence:  Enzymatic Nucleic acid
gcagcgaugcgaccc

SEQ ID NO: 9303 - RNA, 13 nt, Artificial Sequence
  Description of Artificial Sequence:  Enzymatic Nucleic acid
ugggcaucugccu

SEQ ID NO: 9304 - RNA, 13 nt, Artificial Sequence
  Description of Artificial Sequence:  Enzymatic Nucleic acid
ugucuacaugauc

SEQ ID NO: 9305 - RNA, 15 nt, Artificial Sequence
  Description of Artificial Sequence:  Enzymatic Nucleic acid
augucuacaugauca

SEQ ID NO: 9306 - RNA, 13 nt, Artificial Sequence
  Description of Artificial Sequence:  Enzymatic Nucleic acid
ucuacaugaucau

SEQ ID NO: 9307 - RNA, 15 nt, Artificial Sequence
  Description of Artificial Sequence:  Enzymatic Nucleic acid
gucuacaugaucaug

SEQ ID NO: 9308 - RNA, 13 nt, Artificial Sequence
  Description of Artificial Sequence:  Enzymatic Nucleic acid
acaugaucauggu

SEQ ID NO: 9309 - RNA, 15 nt, Artificial Sequence
  Description of Artificial Sequence:  Enzymatic Nucleic acid
uacaugaucaugguc

SEQ ID NO: 9310 - RNA, 13 nt, Artificial Sequence
  Description of Artificial Sequence:  Enzymatic Nucleic acid
ugaucauggucaa

SEQ ID NO: 9311 - RNA, 15 nt, Artificial Sequence
  Description of Artificial Sequence:  Enzymatic Nucleic acid
gcccucaacacagug

SEQ ID NO: 9312 - RNA, 15 nt, Artificial Sequence
  Description of Artificial Sequence:  Enzymatic Nucleic acid
uucagcaacaacccu

SEQ ID NO: 9313 - RNA, 15 nt, Artificial Sequence
  Description of Artificial Sequence:  Enzymatic Nucleic acid
ucuacaaccccacca

SEQ ID NO: 9314 - RNA, 15 nt, Artificial Sequence
  Description of Artificial Sequence:  Enzymatic Nucleic acid
gagggcaaauacagc

SEQ ID NO: 9315 - RNA, 15 nt, Artificial Sequence
  Description of Artificial Sequence:  Enzymatic Nucleic acid
uggaggaagacggcg

SEQ ID NO: 9316 - RNA, 15 nt, Artificial Sequence
  Description of Artificial Sequence:  Enzymatic Nucleic acid
ucacacauacuccuc

SEQ ID NO: 9317 - RNA, 15 nt, Artificial Sequence
  Description of Artificial Sequence:  Enzymatic Nucleic acid
ccuagaaaucauacg

SEQ ID NO: 9318 - RNA, 15 nt, Artificial Sequence
  Description of Artificial Sequence:  Enzymatic Nucleic acid
gggagaaaacaacac

SEQ ID NO: 9319 - RNA, 15 nt, Artificial Sequence
  Description of Artificial Sequence:  Enzymatic Nucleic acid
cgguguauaagggac

SEQ ID NO: 9320 - RNA, 15 nt, Artificial Sequence
  Description of Artificial Sequence:  Enzymatic Nucleic acid
accuccaccgugcaa

SEQ ID NO: 9321 - RNA, 15 nt, Artificial Sequence
  Description of Artificial Sequence:  Enzymatic Nucleic acid
aagggcaugaacuac

SEQ ID NO: 9322 - RNA, 15 nt, Artificial Sequence
  Description of Artificial Sequence:  Enzymatic Nucleic acid
gugcggaagagaaag

SEQ ID NO: 9323 - RNA, 15 nt, Artificial Sequence
  Description of Artificial Sequence:  Enzymatic Nucleic acid
agcaacaauuccacc

SEQ ID NO: 9324 - RNA, 15 nt, Artificial Sequence
  Description of Artificial Sequence:  Enzymatic Nucleic acid
gcaacaauuccaccg

SEQ ID NO: 9325 - RNA, 15 nt, Artificial Sequence
  Description of Artificial Sequence:  Enzymatic Nucleic acid
uacauaaaccagucc

SEQ ID NO: 9326 - RNA, 15 nt, Artificial Sequence
  Description of Artificial Sequence:  Enzymatic Nucleic acid
agacccacacuacca

SEQ ID NO: 9327 - RNA, 13 nt, Artificial Sequence
  Description of Artificial Sequence:  Enzymatic Nucleic acid
cccacacuaccag

SEQ ID NO: 9328 - RNA, 15 nt, Artificial Sequence
  Description of Artificial Sequence:  Enzymatic Nucleic acid
uaucucaacacuguc

SEQ ID NO: 9329 - RNA, 15 nt, Artificial Sequence
  Description of Artificial Sequence:  Enzymatic Nucleic acid
cgcacauhccagguu

SEQ ID NO: 9330 - RNA, 15 nt, Artificial Sequence
  Description of Artificial Sequence:  Enzymatic Nucleic acid
cgcaacuhgcuguac

SEQ ID NO: 9331 - RNA, 15 nt, Artificial Sequence
  Description of Artificial Sequence:  Enzymatic Nucleic acid
cuaccgchuaacgug

SEQ ID NO: 9332 - RNA, 15 nt, Artificial Sequence
  Description of Artificial Sequence:  Enzymatic Nucleic acid
gacuugchguaaccc

SEQ ID NO: 9333 - RNA, 15 nt, Artificial Sequence
  Description of Artificial Sequence:  Enzymatic Nucleic acid
cgcuucahcagaugc

SEQ ID NO: 9334 - RNA, 15 nt, Artificial Sequence
  Description of Artificial Sequence:  Enzymatic Nucleic acid
cauuguahgccacgc

SEQ ID NO: 9335 - RNA, 20 nt, Artificial Sequence
  Description of Artificial Sequence:  Enzymatic Nucleic acid
cccaaugggagcugcugggg

SEQ ID NO: 9336 - RNA, 23 nt, Artificial Sequence
  Description of Artificial Sequence:  Enzymatic Nucleic acid
gagaacugccagaaacugaccaa

SEQ ID NO: 9337 - RNA, 20 nt, Artificial Sequence
  Description of Artificial Sequence:  Enzymatic Nucleic acid
ccgagccuguggggccgaca

SEQ ID NO: 9338 - RNA, 23 nt, Artificial Sequence
  Description of Artificial Sequence:  Enzymatic Nucleic acid
aaaggaaaucacaggguuuuugc

SEQ ID NO: 9339 - RNA, 20 nt, Artificial Sequence
  Description of Artificial Sequence:  Enzymatic Nucleic acid
uugccggaaugucagccgag

SEQ ID NO: 9340 - RNA, 23 nt, Artificial Sequence
  Description of Artificial Sequence:  Enzymatic Nucleic acid
ugccaaguccuacagacuccaac

SEQ ID NO: 9341 - RNA, 23 nt, Artificial Sequence
  Description of Artificial Sequence:  Enzymatic Nucleic acid
uugauuggggaucuuggaguuuu

SEQ ID NO: 9342 - RNA, 23 nt, Artificial Sequence
  Description of Artificial Sequence:  Enzymatic Nucleic acid
auuggagcaugaccacggaggau

SEQ ID NO: 9343 - RNA, 15 nt, Artificial Sequence
  Description of Artificial Sequence:  Enzymatic Nucleic acid
acgcuauauugucga

SEQ ID NO: 9344 - RNA, 15 nt, Artificial Sequence
  Description of Artificial Sequence:  Enzymatic Nucleic acid
ucugguuucguaggc

SEQ ID NO: 9345 - RNA, 15 nt, Artificial Sequence
  Description of Artificial Sequence:  Enzymatic Nucleic acid
ccgaauuaaacgaaa

SEQ ID NO: 9346 - RNA, 13 nt, Artificial Sequence
  Description of Artificial Sequence:  Enzymatic Nucleic acid
gaugcucgcgcua

SEQ ID NO: 9347 - RNA, 13 nt, Artificial Sequence
  Description of Artificial Sequence:  Enzymatic Nucleic acid
ccgucucucagca

SEQ ID NO: 9348 - RNA, 13 nt, Artificial Sequence
  Description of Artificial Sequence:  Enzymatic Nucleic acid
gcugccagucgug

SEQ ID NO: 9349 - RNA, 15 nt, Artificial Sequence
  Description of Artificial Sequence:  Enzymatic Nucleic acid
ccauggcuugaacaa

SEQ ID NO: 9350 - RNA, 15 nt, Artificial Sequence
  Description of Artificial Sequence:  Enzymatic Nucleic acid
cguccgccacaccuc

SEQ ID NO: 9351 - RNA, 15 nt, Artificial Sequence
  Description of Artificial Sequence:  Enzymatic Nucleic acid
ccuauucucgcguua

SEQ ID NO: 9352 - RNA, 15 nt, Artificial Sequence
  Description of Artificial Sequence:  Enzymatic Nucleic acid
agccgacuuucgugg

SEQ ID NO: 9353 - RNA, 37 nt, Artificial Sequence
  Description of Artificial Sequence:  Enzymatic Nucleic acid
  misc_feature (1)..(8): 2'-O-Methyl
  misc_feature (12)..(12): 2'-O-Methyl
  misc_feature (14)..(26): 2'-O-Methyl
  misc_feature (28)..(29): 2'-O-Methyl
  misc_feature (31)..(36): 2'-O-Methyl
  misc_feature (1)..(4): Phosphorothioate 3'-Internucleotide Linkage
  misc_feature (9)..(9): 2'-deoxy-2'-C-allyl
  misc_feature (37)..(37): n stands for inverted deoxyabasic derivative
cgaucaacugaugaggccgaaaggccgaaacuggacn

SEQ ID NO: 9354 - RNA, 37 nt, Artificial Sequence
  Description of Artificial Sequence:  Enzymatic Nucleic acid
  misc_feature (1)..(8): 2'-O-Methyl
  misc_feature (12)..(12): 2'-O-Methyl
  misc_feature (14)..(26): 2'-O-Methyl
  misc_feature (28)..(29): 2'-O-Methyl
  misc_feature (31)..(36): 2'-O-Methyl
  misc_feature (1)..(4): Phosphorothioate 3'-Internucleotide Linkage
  misc_feature (9)..(9): 2'-deoxy-2'-C-allyl
  misc_feature (37)..(37): n stands for inverted deoxyabasic derivative
uagauaacugaugaggccgaaaggccgaaacugcuan

SEQ ID NO: 9355 - RNA, 37 nt, Artificial Sequence
  Description of Artificial Sequence:  Enzymatic Nucleic acid
  misc_feature (1)..(8): 2'-O-Methyl
  misc_feature (12)..(12): 2'-O-Methyl
  misc_feature (14)..(26): 2'-O-Methyl
  misc_feature (28)..(29): 2'-O-Methyl
  misc_feature (31)..(36): 2'-O-Methyl
  misc_feature (1)..(4): Phosphorothioate 3'-Internucleotide Linkage
  misc_feature (9)..(9): 2'-deoxy-2'-C-allyl
  misc_feature (37)..(37): n stands for inverted deoxyabasic derivative
cacugcucugaugaggccgaaaggccgaaacuaugun

SEQ ID NO: 9356 - RNA, 35 nt, Artificial Sequence
  Description of Artificial Sequence:  Enzymatic Nucleic acid
  misc_feature (1)..(7): 2'-O-Methyl
  misc_feature (11)..(11): 2'-O-Methyl
  misc_feature (13)..(25): 2'-O-Methyl
  misc_feature (27)..(28): 2'-O-Methyl
  misc_feature (30)..(34): 2'-O-Methyl
  misc_feature (1)..(4): Phosphorothioate 3'-Internucleotide Linkage
  misc_feature (8)..(8): 2'-deoxy-2'-C-allyl
  misc_feature (35)..(35): n stands for inverted deoxyabasic derivative
acuucucugaugaggccgaaaggccgaaacacuun

SEQ ID NO: 9357 - RNA, 35 nt, Artificial Sequence
  Description of Artificial Sequence:  Enzymatic Nucleic acid
  misc_feature (1)..(7): 2'-O-Methyl
  misc_feature (11)..(11): 2'-O-Methyl
  misc_feature (13)..(25): 2'-O-Methyl
  misc_feature (27)..(28): 2'-O-Methyl
  misc_feature (30)..(34): 2'-O-Methyl
  misc_feature (1)..(4): Phosphorothioate 3'-Internucleotide Linkage
  misc_feature (8)..(8): 2'-deoxy-2'-C-allyl
  misc_feature (35)..(35): n stands for inverted deoxyabasic derivative
caccaacugaugaggccgaaaggccgaaaccuaun

SEQ ID NO: 9358 - RNA, 35 nt, Artificial Sequence
  Description of Artificial Sequence:  Enzymatic Nucleic acid
  misc_feature (1)..(7): 2'-O-Methyl
  misc_feature (11)..(11): 2'-O-Methyl
  misc_feature (13)..(25): 2'-O-Methyl
  misc_feature (27)..(28): 2'-O-Methyl
  misc_feature (30)..(34): 2'-O-Methyl
  misc_feature (1)..(4): Phosphorothioate 3'-Internucleotide Linkage
  misc_feature (8)..(8): 2'-deoxy-2'-C-allyl
  misc_feature (35)..(35): n stands for inverted deoxyabasic derivative
ucugcgcugaugaggccgaaaggccgaaacuuccn

SEQ ID NO: 9359 - RNA, 35 nt, Artificial Sequence
  Description of Artificial Sequence:  Enzymatic Nucleic acid
  misc_feature (1)..(7): 2'-O-Methyl
  misc_feature (11)..(11): 2'-O-Methyl
  misc_feature (13)..(25): 2'-O-Methyl
  misc_feature (27)..(28): 2'-O-Methyl
  misc_feature (30)..(34): 2'-O-Methyl
  misc_feature (1)..(4): Phosphorothioate 3'-Internucleotide Linkage
  misc_feature (8)..(8): 2'-deoxy-2'-C-allyl
  misc_feature (35)..(35): n stands for inverted deoxyabasic derivative
cugaaucugaugaggccgaaaggccgaaacaaggn

SEQ ID NO: 9360 - RNA, 37 nt, Artificial Sequence
  Description of Artificial Sequence:  Enzymatic Nucleic acid
  misc_feature (1)..(8): 2'-O-Methyl
  misc_feature (12)..(12): 2'-O-Methyl
  misc_feature (14)..(26): 2'-O-Methyl
  misc_feature (28)..(29): 2'-O-Methyl
  misc_feature (31)..(36): 2'-O-Methyl
  misc_feature (1)..(4): Phosphorothioate 3'-Internucleotide Linkage
  misc_feature (9)..(9): 2'-deoxy-2'-C-allyl
  misc_feature (37)..(37): n stands for inverted deoxyabasic derivative
ucaaauacugaugaggccgaaaggccgaaaccucuun

SEQ ID NO: 9361 - RNA, 37 nt, Artificial Sequence
  Description of Artificial Sequence:  Enzymatic Nucleic acid
  misc_feature (1)..(8): 2'-O-Methyl
  misc_feature (12)..(12): 2'-O-Methyl
  misc_feature (14)..(26): 2'-O-Methyl
  misc_feature (28)..(29): 2'-O-Methyl
  misc_feature (31)..(36): 2'-O-Methyl
  misc_feature (1)..(4): Phosphorothioate 3'-Internucleotide Linkage
  misc_feature (9)..(9): 2'-deoxy-2'-C-allyl
  misc_feature (37)..(37): n stands for inverted deoxyabasic derivative
caauagccugaugaggccgaaaggccgaaacaaugan

SEQ ID NO: 9362 - RNA, 35 nt, Artificial Sequence
  Description of Artificial Sequence:  Enzymatic Nucleic acid
  misc_feature (1)..(7): 2'-O-Methyl
  misc_feature (11)..(11): 2'-O-Methyl
  misc_feature (13)..(25): 2'-O-Methyl
  misc_feature (27)..(28): 2'-O-Methyl
  misc_feature (30)..(34): 2'-O-Methyl
  misc_feature (1)..(4): Phosphorothioate 3'-Internucleotide Linkage
  misc_feature (8)..(8): 2'-deoxy-2'-C-allyl
  misc_feature (35)..(35): n stands for inverted deoxyabasic derivative
cuggaacugaugaggccgaaaggccgaaacuugun

SEQ ID NO: 9363 - RNA, 35 nt, Artificial Sequence
  Description of Artificial Sequence:  Enzymatic Nucleic acid
  misc_feature (1)..(7): 2'-O-Methyl
  misc_feature (11)..(11): 2'-O-Methyl
  misc_feature (13)..(25): 2'-O-Methyl
  misc_feature (27)..(28): 2'-O-Methyl
  misc_feature (30)..(34): 2'-O-Methyl
  misc_feature (1)..(4): Phosphorothioate 3'-Internucleotide Linkage
  misc_feature (8)..(8): 2'-deoxy-2'-C-allyl
  misc_feature (35)..(35): n stands for inverted deoxyabasic derivative
ugccaucugaugaggccgaaaggccgaaacuugan

SEQ ID NO: 9364 - RNA, 37 nt, Artificial Sequence
  Description of Artificial Sequence:  Enzymatic Nucleic acid
  misc_feature (1)..(8): 2'-O-Methyl
  misc_feature (12)..(12): 2'-O-Methyl
  misc_feature (14)..(26): 2'-O-Methyl
  misc_feature (28)..(29): 2'-O-Methyl
  misc_feature (31)..(36): 2'-O-Methyl
  misc_feature (1)..(4): Phosphorothioate 3'-Internucleotide Linkage
  misc_feature (9)..(9): 2'-deoxy-2'-C-allyl
  misc_feature (37)..(37): n stands for inverted deoxyabasic derivative
ccuacugcugaugaggccgaaaggccgaaaccugccn

SEQ ID NO: 9365 - RNA, 37 nt, Artificial Sequence
  Description of Artificial Sequence:  Enzymatic Nucleic acid
  misc_feature (1)..(8): 2'-O-Methyl
  misc_feature (12)..(12): 2'-O-Methyl
  misc_feature (14)..(26): 2'-O-Methyl
  misc_feature (28)..(29): 2'-O-Methyl
  misc_feature (31)..(36): 2'-O-Methyl
  misc_feature (1)..(4): Phosphorothioate 3'-Internucleotide Linkage
  misc_feature (9)..(9): 2'-deoxy-2'-C-allyl
  misc_feature (37)..(37): n stands for inverted deoxyabasic derivative
cuuaucccugaugaggccgaaaggccgaaacuguacn

SEQ ID NO: 9366 - RNA, 37 nt, Artificial Sequence
  Description of Artificial Sequence:  Enzymatic Nucleic acid
  misc_feature (1)..(8): 2'-O-Methyl
  misc_feature (12)..(12): 2'-O-Methyl
  misc_feature (14)..(26): 2'-O-Methyl
  misc_feature (28)..(29): 2'-O-Methyl
  misc_feature (31)..(36): 2'-O-Methyl
  misc_feature (1)..(4): Phosphorothioate 3'-Internucleotide Linkage
  misc_feature (9)..(9): 2'-deoxy-2'-C-allyl
  misc_feature (37)..(37): n stands for inverted deoxyabasic derivative
acauuuucugaugaggccgaaaggccgaaacaaaagn

SEQ ID NO: 9367 - RNA, 35 nt, Artificial Sequence
  Description of Artificial Sequence:  Enzymatic Nucleic acid
  misc_feature (1)..(7): 2'-O-Methyl
  misc_feature (11)..(11): 2'-O-Methyl
  misc_feature (13)..(25): 2'-O-Methyl
  misc_feature (27)..(28): 2'-O-Methyl
  misc_feature (30)..(34): 2'-O-Methyl
  misc_feature (1)..(4): Phosphorothioate 3'-Internucleotide Linkage
  misc_feature (8)..(8): 2'-deoxy-2'-C-allyl
  misc_feature (35)..(35): n stands for inverted deoxyabasic derivative
aguaagcugaugaggccgaaaggccgaaaccgugn

SEQ ID NO: 9368 - RNA, 35 nt, Artificial Sequence
  Description of Artificial Sequence:  Enzymatic Nucleic acid
  misc_feature (1)..(7): 2'-O-Methyl
  misc_feature (11)..(11): 2'-O-Methyl
  misc_feature (13)..(25): 2'-O-Methyl
  misc_feature (27)..(28): 2'-O-Methyl
  misc_feature (30)..(34): 2'-O-Methyl
  misc_feature (1)..(4): Phosphorothioate 3'-Internucleotide Linkage
  misc_feature (8)..(8): 2'-deoxy-2'-C-allyl
  misc_feature (35)..(35): n stands for inverted deoxyabasic derivative
ccaaagcugaugaggccgaaaggccgaaaccugan

SEQ ID NO: 9369 - RNA, 37 nt, Artificial Sequence
  Description of Artificial Sequence:  Enzymatic Nucleic acid
  misc_feature (1)..(8): 2'-O-Methyl
  misc_feature (12)..(12): 2'-O-Methyl
  misc_feature (14)..(26): 2'-O-Methyl
  misc_feature (28)..(29): 2'-O-Methyl
  misc_feature (31)..(36): 2'-O-Methyl
  misc_feature (1)..(4): Phosphorothioate 3'-Internucleotide Linkage
  misc_feature (9)..(9): 2'-deoxy-2'-C-allyl
  misc_feature (37)..(37): n stands for inverted deoxyabasic derivative
gaacauacugaugaggccgaaaggccgaaacucuuun

SEQ ID NO: 9370 - RNA, 35 nt, Artificial Sequence
  Description of Artificial Sequence:  Enzymatic Nucleic acid
  misc_feature (1)..(7): 2'-O-Methyl
  misc_feature (11)..(11): 2'-O-Methyl
  misc_feature (13)..(25): 2'-O-Methyl
  misc_feature (27)..(28): 2'-O-Methyl
  misc_feature (30)..(34): 2'-O-Methyl
  misc_feature (1)..(4): Phosphorothioate 3'-Internucleotide Linkage
  misc_feature (8)..(8): 2'-deoxy-2'-C-allyl
  misc_feature (35)..(35): n stands for inverted deoxyabasic derivative
ggcagacugaugaggccgaaaggccgaaacacuun

SEQ ID NO: 9371 - RNA, 37 nt, Artificial Sequence
  Description of Artificial Sequence:  Enzymatic Nucleic acid
  misc_feature (1)..(8): 2'-O-Methyl
  misc_feature (12)..(12): 2'-O-Methyl
  misc_feature (14)..(26): 2'-O-Methyl
  misc_feature (28)..(29): 2'-O-Methyl
  misc_feature (31)..(36): 2'-O-Methyl
  misc_feature (1)..(4): Phosphorothioate 3'-Internucleotide Linkage
  misc_feature (9)..(9): 2'-deoxy-2'-C-allyl
  misc_feature (37)..(37): n stands for inverted deoxyabasic derivative
uauuuaccugaugaggccgaaaggccgaaaccugaan

SEQ ID NO: 9372 - RNA, 37 nt, Artificial Sequence
  Description of Artificial Sequence:  Enzymatic Nucleic acid
  misc_feature (1)..(8): 2'-O-Methyl
  misc_feature (12)..(12): 2'-O-Methyl
  misc_feature (14)..(26): 2'-O-Methyl
  misc_feature (28)..(29): 2'-O-Methyl
  misc_feature (31)..(36): 2'-O-Methyl
  misc_feature (1)..(4): Phosphorothioate 3'-Internucleotide Linkage
  misc_feature (9)..(9): 2'-deoxy-2'-C-allyl
  misc_feature (37)..(37): n stands for inverted deoxyabasic derivative
ugugugucugaugaggccgaaaggccgaaacugaacn

SEQ ID NO: 9373 - RNA, 35 nt, Artificial Sequence; identical to SEQ ID NO: 9358
  Description of Artificial Sequence:  Enzymatic Nucleic acid
  misc_feature (1)..(7): 2'-O-Methyl
  misc_feature (11)..(11): 2'-O-Methyl
  misc_feature (13)..(25): 2'-O-Methyl
  misc_feature (27)..(28): 2'-O-Methyl
  misc_feature (30)..(34): 2'-O-Methyl
  misc_feature (8)..(8): 2'-deoxy-2'-C-allyl
  misc_feature (35)..(35): n stands for inverted deoxyabasic derivative

SEQ ID NO: 9374 - DNA, 25 bp, Artificial Sequence
  Description of Artificial Sequence:  Enzymatic Nucleic acid
  misc_feature (1)..(1): n stands for inverted deoxyabasic derivative
  misc_feature (25)..(25): n stands for inverted deoxyabasic derivative
  misc_feature (2)..(8): n stands for any 2'-O-Methyl a, c, g, or u
  misc_feature (18)..(24): n stands for any 2'-O-Methyl a, c, g, or u
  misc_feature (9)..(17): n stands for any a, c, g, or t
  misc_feature (9)..(17): Phosphorothioate 3'-Internucleotide Linkage
nnnnnnnnnnnnnnnnnnnnnnnnn

SEQ ID NO: 9375 - DNA, 25 bp, Artificial Sequence
  Description of Artificial Sequence:  Enzymatic Nucleic acid
  misc_feature (1)..(1): n stands for inverted deoxyabasic derivative
  misc_feature (25)..(25): n stands for inverted deoxyabasic derivative
  misc_feature (2)..(8): 2'-O-Methyl
  misc_feature (18)..(24): 2'-O-Methyl
  misc_feature (9)..(17): Phosphorothioate 3'-Internucleotide Linkage
ncugcugctgctgctgcugcugcun

SEQ ID NO: 9376 - RNA, 34 nt, Artificial Sequence
  Description of Artificial Sequence:  Enzymatic Nucleic acid
  misc_feature (1)..(15): 2'-O-Methyl
  misc_feature (17)..(22): 2'-O-Methyl
  misc_feature (25)..(25): 2'-O-Methyl
  misc_feature (27)..(33): 2'-O-Methyl
  misc_feature (1)..(4): Phosphorothioate 3'-Internucleotide Linkage
  misc_feature (16)..(16): 2'-deoxy-2'-Amino
  misc_feature (26)..(26): 2'-deoxy-2'-Amino
  misc_feature (34)..(34): n stands for inverted deoxyabasic derivative
gcaguggccgaaaggcgagugaggucuagcucan

SEQ ID NO: 9377 - RNA, 34 nt, Artificial Sequence
  Description of Artificial Sequence:  Enzymatic Nucleic acid
  misc_feature (1)..(8): 2'-O-Methyl
  misc_feature (10)..(23): 2'-O-Methyl
  misc_feature (25)..(29): 2'-O-Methyl
  misc_feature (32)..(33): 2'-O-Methyl
  misc_feature (1)..(4): Phosphorothioate 3'-Internucleotide Linkage
  misc_feature (34)..(34): n stands for inverted deoxyabasic derivative
ggacguugcacaugguacacguacgacgaggggn

SEQ ID NO: 9378 - RNA, 38 nt, Artificial Sequence
  Description of Artificial Sequence:  Enzymatic Nucleic acid
  misc_feature (1)..(10): 2'-O-Methyl
  misc_feature (12)..(13): 2'-O-Methyl
  misc_feature (19)..(23): 2'-O-Methyl
  misc_feature (25)..(26): 2'-O-Methyl
  misc_feature (31)..(37): 2'-O-Methyl
  misc_feature (1)..(4): Phosphorothioate 3'-Internucleotide Linkage
  misc_feature (11)..(11): n stands for hexaethylene glycol spacer
  misc_feature (24)..(24): n stands for hexaethylene glycol spacer
  misc_feature (14)..(18): 2'-deoxy-2'-Amino
  misc_feature (27)..(27): 2'deoxy-2'-Amino
  misc_feature (38)..(38): n stands for inverted deoxyabasic derivative
agggucggganucccuucaagganuccgggaucgcugn

SEQ ID NO: 9379 - RNA, 36 nt, Artificial Sequence
  Description of Artificial Sequence:  Enzymatic Nucleic acid
  misc_feature (1)..(9): 2'-O-Methyl
  misc_feature (11)..(12): 2'-O-Methyl
  misc_feature (18)..(22): 2'-O-Methyl
  misc_feature (24)..(25): 2'-O-Methyl
  misc_feature (30)..(35): 2'-O-Methyl
  misc_feature (1)..(4): Phosphorothioate 3'-Internucleotide Linkage
  misc_feature (10)..(10): n stands for hexaethylene glycol spacer
  misc_feature (23)..(23): n stands for hexaethylene glycol spacer
  misc_feature (13)..(17): 2'-deoxy-2'-Amino
  misc_feature (26)..(26): 2'deoxy-2'-Amino
  misc_feature (36)..(36): n stands for inverted deoxyabasic derivative
gccaucgganucccuucaagganuccgggacuugan

SEQ ID NO: 9380 - RNA, 36 nt, Artificial Sequence
  Description of Artificial Sequence:  Enzymatic Nucleic acid
  misc_feature (1)..(9): 2'-O-Methyl
  misc_feature (11)..(12): 2'-O-Methyl
  misc_feature (18)..(22): 2'-O-Methyl
  misc_feature (24)..(25): 2'-O-Methyl
  misc_feature (30)..(35): 2'-O-Methyl
  misc_feature (1)..(4): Phosphorothioate 3'-Internucleotide Linkage
  misc_feature (10)..(10): n stands for hexaethylene glycol spacer
  misc_feature (23)..(23): n stands for hexaethylene glycol spacer
  misc_feature (13)..(17): 2'-deoxy-2'-Amino
  misc_feature (26)..(26): 2'deoxy-2'-Amino
  misc_feature (36)..(36): n stands for inverted deoxyabasic derivative
aucacugganucccuucaagganuccgggugguggn

SEQ ID NO: 9381 - RNA, 36 nt, Artificial Sequence
  Description of Artificial Sequence:  Enzymatic Nucleic acid
  misc_feature (1)..(9): 2'-O-Methyl
  misc_feature (11)..(12): 2'-O-Methyl
  misc_feature (18)..(22): 2'-O-Methyl
  misc_feature (24)..(25): 2'-O-Methyl
  misc_feature (30)..(35): 2'-O-Methyl
  misc_feature (1)..(4): Phosphorothioate 3'-Internucleotide Linkage
  misc_feature (10)..(10): n stands for hexaethylene glycol spacer
  misc_feature (23)..(23): n stands for hexaethylene glycol spacer
  misc_feature (13)..(17): 2'-deoxy-2'-Amino
  misc_feature (26)..(26): 2'deoxy-2'-Amino
  misc_feature (36)..(36): n stands for inverted deoxyabasic derivative
acaucagganucccuucaagganuccgggucuggun

SEQ ID NO: 9382 - RNA, 36 nt, Artificial Sequence
  Description of Artificial Sequence:  Enzymatic Nucleic acid
  misc_feature (1)..(9): 2'-O-Methyl
  misc_feature (11)..(12): 2'-O-Methyl
  misc_feature (18)..(22): 2'-O-Methyl
  misc_feature (24)..(25): 2'-O-Methyl
  misc_feature (30)..(35): 2'-O-Methyl
  misc_feature (1)..(4): Phosphorothioate 3'-Internucleotide Linkage
  misc_feature (10)..(10): n stands for hexaethylene glycol spacer
  misc_feature (23)..(23): n stands for hexaethylene glycol spacer
  misc_feature (13)..(17): 2'-deoxy-2'-Amino
  misc_feature (26)..(26): 2'deoxy-2'-Amino
  misc_feature (36)..(36): n stands for inverted deoxyabasic derivative
caugaugganucccuucaagganuccgggauguagn

SEQ ID NO: 9383 - RNA, 38 nt, Artificial Sequence
  Description of Artificial Sequence:  Enzymatic Nucleic acid
  misc_feature (1)..(10): 2'-O-Methyl
  misc_feature (12)..(13): 2'-O-Methyl
  misc_feature (19)..(23): 2'-O-Methyl
  misc_feature (25)..(26): 2'-O-Methyl
  misc_feature (31)..(37): 2'-O-Methyl
  misc_feature (1)..(4): Phosphorothioate 3'-Internucleotide Linkage
  misc_feature (11)..(11): n stands for hexaethylene glycol spacer
  misc_feature (24)..(24): n stands for hexaethylene glycol spacer
  misc_feature (14)..(18): 2'-deoxy-2'-Amino
  misc_feature (27)..(27): 2'deoxy-2'-Amino
  misc_feature (38)..(38): n stands for inverted deoxyabasic derivative
ccaugaugganucccuucaagganuccgggauguagan

SEQ ID NO: 9384 - RNA, 36 nt, Artificial Sequence
  Description of Artificial Sequence:  Enzymatic Nucleic acid
  misc_feature (1)..(9): 2'-O-Methyl
  misc_feature (11)..(12): 2'-O-Methyl
  misc_feature (18)..(22): 2'-O-Methyl
  misc_feature (24)..(25): 2'-O-Methyl
  misc_feature (30)..(35): 2'-O-Methyl
  misc_feature (1)..(4): Phosphorothioate 3'-Internucleotide Linkage
  misc_feature (10)..(10): n stands for hexaethylene glycol spacer
  misc_feature (23)..(23): n stands for hexaethylene glycol spacer
  misc_feature (13)..(17): 2'-deoxy-2'-Amino
  misc_feature (26)..(26): 2'deoxy-2'-Amino
  misc_feature (36)..(36): n stands for inverted deoxyabasic derivative
agaagcgganucccuucaagganuccgggcugcugn

SEQ ID NO: 9385 - RNA, 36 nt, Artificial Sequence
  Description of Artificial Sequence:  Enzymatic Nucleic acid
  misc_feature (1)..(9): 2'-O-Methyl
  misc_feature (11)..(12): 2'-O-Methyl
  misc_feature (18)..(22): 2'-O-Methyl
  misc_feature (24)..(25): 2'-O-Methyl
  misc_feature (30)..(35): 2'-O-Methyl
  misc_feature (1)..(4): Phosphorothioate 3'-Internucleotide Linkage
  misc_feature (10)..(10): n stands for hexaethylene glycol spacer
  misc_feature (23)..(23): n stands for hexaethylene glycol spacer
  misc_feature (13)..(17): 2'-deoxy-2'-Amino
  misc_feature (26)..(26): 2'deoxy-2'-Amino
  misc_feature (36)..(36): n stands for inverted deoxyabasic derivative
aagaaggganucccuucaagganuccgggccugcun

SEQ ID NO: 9386 - RNA, 38 nt, Artificial Sequence
  Description of Artificial Sequence:  Enzymatic Nucleic acid
  misc_feature (1)..(10): 2'-O-Methyl
  misc_feature (12)..(13): 2'-O-Methyl
  misc_feature (19)..(23): 2'-O-Methyl
  misc_feature (25)..(26): 2'-O-Methyl
  misc_feature (31)..(37): 2'-O-Methyl
  misc_feature (1)..(4): Phosphorothioate 3'-Internucleotide Linkage
  misc_feature (11)..(11): n stands for hexaethylene glycol spacer
  misc_feature (24)..(24): n stands for hexaethylene glycol spacer
  misc_feature (14)..(18): 2'-deoxy-2'-Amino
  misc_feature (27)..(27): 2'deoxy-2'-Amino
  misc_feature (38)..(38): n stands for inverted deoxyabasic derivative
agguggcgganucccuucaagganuccgggugucgucn

SEQ ID NO: 9387 - RNA, 38 nt, Artificial Sequence
  Description of Artificial Sequence:  Enzymatic Nucleic acid
  misc_feature (1)..(10): 2'-O-Methyl
  misc_feature (12)..(13): 2'-O-Methyl
  misc_feature (19)..(23): 2'-O-Methyl
  misc_feature (25)..(26): 2'-O-Methyl
  misc_feature (31)..(37): 2'-O-Methyl
  misc_feature (1)..(4): Phosphorothioate 3'-Internucleotide Linkage
  misc_feature (11)..(11): n stands for hexaethylene glycol spacer
  misc_feature (24)..(24): n stands for hexaethylene glycol spacer
  misc_feature (14)..(18): 2'-deoxy-2'-Amino
  misc_feature (27)..(27): 2'deoxy-2'-Amino
  misc_feature (38)..(38): n stands for inverted deoxyabasic derivative
uuuccucgganucccuucaagganuccgggagagcccn

SEQ ID NO: 9388 - RNA, 38 nt, Artificial Sequence
  Description of Artificial Sequence:  Enzymatic Nucleic acid
  misc_feature (1)..(10): 2'-O-Methyl
  misc_feature (12)..(13): 2'-O-Methyl
  misc_feature (19)..(23): 2'-O-Methyl
  misc_feature (25)..(26): 2'-O-Methyl
  misc_feature (31)..(37): 2'-O-Methyl
  misc_feature (1)..(4): Phosphorothioate 3'-Internucleotide Linkage
  misc_feature (11)..(11): n stands for hexaethylene glycol spacer
  misc_feature (24)..(24): n stands for hexaethylene glycol spacer
  misc_feature (14)..(18): 2'-deoxy-2'-Amino
  misc_feature (27)..(27): 2'deoxy-2'-Amino
  misc_feature (38)..(38): n stands for inverted deoxyabasic derivative
gcuccuugganucccuucaagganuccgggaguccggn

SEQ ID NO: 9389 - RNA, 38 nt, Artificial Sequence
  Description of Artificial Sequence:  Enzymatic Nucleic acid
  misc_feature (1)..(10): 2'-O-Methyl
  misc_feature (12)..(13): 2'-O-Methyl
  misc_feature (19)..(23): 2'-O-Methyl
  misc_feature (25)..(26): 2'-O-Methyl
  misc_feature (31)..(37): 2'-O-Methyl
  misc_feature (1)..(4): Phosphorothioate 3'-Internucleotide Linkage
  misc_feature (11)..(11): n stands for hexaethylene glycol spacer
  misc_feature (24)..(24): n stands for hexaethylene glycol spacer
  misc_feature (14)..(18): 2'-deoxy-2'-Amino
  misc_feature (27)..(27): 2'deoxy-2'-Amino
  misc_feature (38)..(38): n stands for inverted deoxyabasic derivative
gcagcucgganucccuucaagganuccggguucagucn

SEQ ID NO: 9390 - RNA, 38 nt, Artificial Sequence
  Description of Artificial Sequence:  Enzymatic Nucleic acid
  misc_feature (1)..(10): 2'-O-Methyl
  misc_feature (12)..(13): 2'-O-Methyl
  misc_feature (19)..(23): 2'-O-Methyl
  misc_feature (25)..(26): 2'-O-Methyl
  misc_feature (31)..(37): 2'-O-Methyl
  misc_feature (1)..(4): Phosphorothioate 3'-Internucleotide Linkage
  misc_feature (11)..(11): n stands for hexaethylene glycol spacer
  misc_feature (24)..(24): n stands for hexaethylene glycol spacer
  misc_feature (14)..(18): 2'-deoxy-2'-Amino
  misc_feature (27)..(27): 2'deoxy-2'-Amino
  misc_feature (38)..(38): n stands for inverted deoxyabasic derivative
ggcagcugganucccuucaagganuccgggcuucagun

SEQ ID NO: 9391 - RNA, 38 nt, Artificial Sequence
  Description of Artificial Sequence:  Enzymatic Nucleic acid
  misc_feature (1)..(10): 2'-O-Methyl
  misc_feature (12)..(13): 2'-O-Methyl
  misc_feature (19)..(23): 2'-O-Methyl
  misc_feature (25)..(26): 2'-O-Methyl
  misc_feature (31)..(37): 2'-O-Methyl
  misc_feature (1)..(4): Phosphorothioate 3'-Internucleotide Linkage
  misc_feature (11)..(11): n stands for hexaethylene glycol spacer
  misc_feature (24)..(24): n stands for hexaethylene glycol spacer
  misc_feature (14)..(18): 2'-deoxy-2'-Amino
  misc_feature (27)..(27): 2'deoxy-2'-Amino
  misc_feature (38)..(38): n stands for inverted deoxyabasic derivative
uccucucgganucccuucaagganuccgggugcacccn

SEQ ID NO: 9392 - RNA, 38 nt, Artificial Sequence
  Description of Artificial Sequence:  Enzymatic Nucleic acid
  misc_feature (1)..(10): 2'-O-Methyl
  misc_feature (12)..(13): 2'-O-Methyl
  misc_feature (19)..(23): 2'-O-Methyl
  misc_feature (25)..(26): 2'-O-Methyl
  misc_feature (31)..(37): 2'-O-Methyl
  misc_feature (1)..(4): Phosphorothioate 3'-Internucleotide Linkage
  misc_feature (11)..(11): n stands for hexaethylene glycol spacer
  misc_feature (24)..(24): n stands for hexaethylene glycol spacer
  misc_feature (14)..(18): 2'-deoxy-2'-Amino
  misc_feature (27)..(27): 2'deoxy-2'-Amino
  misc_feature (38)..(38): n stands for inverted deoxyabasic derivative
uucuccugganucccuucaagganuccggguccugcan

SEQ ID NO: 9393 - RNA, 38 nt, Artificial Sequence
  Description of Artificial Sequence:  Enzymatic Nucleic acid
  misc_feature (1)..(10): 2'-O-Methyl
  misc_feature (12)..(13): 2'-O-Methyl
  misc_feature (19)..(23): 2'-O-Methyl
  misc_feature (25)..(26): 2'-O-Methyl
  misc_feature (31)..(37): 2'-O-Methyl
  misc_feature (1)..(4): Phosphorothioate 3'-Internucleotide Linkage
  misc_feature (11)..(11): n stands for hexaethylene glycol spacer
  misc_feature (24)..(24): n stands for hexaethylene glycol spacer
  misc_feature (14)..(18): 2'-deoxy-2'-Amino
  misc_feature (27)..(27): 2'deoxy-2'-Amino
  misc_feature (38)..(38): n stands for inverted deoxyabasic derivative
ggcaguugganucccuucaagganuccggguccucucn

SEQ ID NO: 9394 - RNA, 38 nt, Artificial Sequence
  Description of Artificial Sequence:  Enzymatic Nucleic acid
  misc_feature (1)..(10): 2'-O-Methyl
  misc_feature (12)..(13): 2'-O-Methyl
  misc_feature (19)..(23): 2'-O-Methyl
  misc_feature (25)..(26): 2'-O-Methyl
  misc_feature (31)..(37): 2'-O-Methyl
  misc_feature (1)..(4): Phosphorothioate 3'-Internucleotide Linkage
  misc_feature (11)..(11): n stands for hexaethylene glycol spacer
  misc_feature (24)..(24): n stands for hexaethylene glycol spacer
  misc_feature (14)..(18): 2'-deoxy-2'-Amino
  misc_feature (27)..(27): 2'deoxy-2'-Amino
  misc_feature (38)..(38): n stands for inverted deoxyabasic derivative
ucuuccugganucccuucaagganuccgggcaucucan

SEQ ID NO: 9395 - RNA, 38 nt, Artificial Sequence
  Description of Artificial Sequence:  Enzymatic Nucleic acid
  misc_feature (1)..(10): 2'-O-Methyl
  misc_feature (12)..(13): 2'-O-Methyl
  misc_feature (19)..(23): 2'-O-Methyl
  misc_feature (25)..(26): 2'-O-Methyl
  misc_feature (31)..(37): 2'-O-Methyl
  misc_feature (1)..(4): Phosphorothioate 3'-Internucleotide Linkage
  misc_feature (11)..(11): n stands for hexaethylene glycol spacer
  misc_feature (24)..(24): n stands for hexaethylene glycol spacer
  misc_feature (14)..(18): 2'-deoxy-2'-Amino
  misc_feature (27)..(27): 2'deoxy-2'-Amino
  misc_feature (38)..(38): n stands for inverted deoxyabasic derivative
cugacgagganucccuucaagganuccgggugcaagan

SEQ ID NO: 9396 - RNA, 38 nt, Artificial Sequence
  Description of Artificial Sequence:  Enzymatic Nucleic acid
  misc_feature (1)..(10): 2'-O-Methyl
  misc_feature (12)..(13): 2'-O-Methyl
  misc_feature (19)..(23): 2'-O-Methyl
  misc_feature (25)..(26): 2'-O-Methyl
  misc_feature (31)..(37): 2'-O-Methyl
  misc_feature (1)..(4): Phosphorothioate 3'-Internucleotide Linkage
  misc_feature (11)..(11): n stands for hexaethylene glycol spacer
  misc_feature (24)..(24): n stands for hexaethylene glycol spacer
  misc_feature (14)..(18): 2'-deoxy-2'-Amino
  misc_feature (27)..(27): 2'deoxy-2'-Amino
  misc_feature (38)..(38): n stands for inverted deoxyabasic derivative
ccccgucgganucccuucaagganuccgggugugcagn

SEQ ID NO: 9397 - RNA, 38 nt, Artificial Sequence
  Description of Artificial Sequence:  Enzymatic Nucleic acid
  misc_feature (1)..(10): 2'-O-Methyl
  misc_feature (12)..(13): 2'-O-Methyl
  misc_feature (19)..(23): 2'-O-Methyl
  misc_feature (25)..(26): 2'-O-Methyl
  misc_feature (31)..(37): 2'-O-Methyl
  misc_feature (1)..(4): Phosphorothioate 3'-Internucleotide Linkage
  misc_feature (11)..(11): n stands for hexaethylene glycol spacer
  misc_feature (24)..(24): n stands for hexaethylene glycol spacer
  misc_feature (14)..(18): 2'-deoxy-2'-Amino
  misc_feature (27)..(27): 2'deoxy-2'-Amino
  misc_feature (38)..(38): n stands for inverted deoxyabasic derivative
caguugugganucccuucaagganuccggguggucccn

SEQ ID NO: 9398 - RNA, 38 nt, Artificial Sequence
  Description of Artificial Sequence:  Enzymatic Nucleic acid
  misc_feature (1)..(10): 2'-O-Methyl
  misc_feature (12)..(13): 2'-O-Methyl
  misc_feature (19)..(23): 2'-O-Methyl
  misc_feature (25)..(26): 2'-O-Methyl
  misc_feature (31)..(37): 2'-O-Methyl
  misc_feature (1)..(4): Phosphorothioate 3'-Internucleotide Linkage
  misc_feature (11)..(11): n stands for hexaethylene glycol spacer
  misc_feature (24)..(24): n stands for hexaethylene glycol spacer
  misc_feature (14)..(18): 2'-deoxy-2'-Amino
  misc_feature (27)..(27): 2'deoxy-2'-Amino
  misc_feature (38)..(38): n stands for inverted deoxyabasic derivative
gcucccugganucccuucaagganuccggguccugcan

SEQ ID NO: 9399 - RNA, 38 nt, Artificial Sequence
  Description of Artificial Sequence:  Enzymatic Nucleic acid
  misc_feature (1)..(10): 2'-O-Methyl
  misc_feature (12)..(13): 2'-O-Methyl
  misc_feature (19)..(23): 2'-O-Methyl
  misc_feature (25)..(26): 2'-O-Methyl
  misc_feature (31)..(37): 2'-O-Methyl
  misc_feature (1)..(4): Phosphorothioate 3'-Internucleotide Linkage
  misc_feature (11)..(11): n stands for hexaethylene glycol spacer
  misc_feature (24)..(24): n stands for hexaethylene glycol spacer
  misc_feature (14)..(18): 2'-deoxy-2'-Amino
  misc_feature (27)..(27): 2'deoxy-2'-Amino
  misc_feature (38)..(38): n stands for inverted deoxyabasic derivative
gacggucgganucccuucaagganuccggguccaagun

SEQ ID NO: 9400 - RNA, 38 nt, Artificial Sequence
  Description of Artificial Sequence:  Enzymatic Nucleic acid
  misc_feature (1)..(10): 2'-O-Methyl
  misc_feature (12)..(13): 2'-O-Methyl
  misc_feature (19)..(23): 2'-O-Methyl
  misc_feature (25)..(26): 2'-O-Methyl
  misc_feature (31)..(37): 2'-O-Methyl
  misc_feature (1)..(4): Phosphorothioate 3'-Internucleotide Linkage
  misc_feature (11)..(11): n stands for hexaethylene glycol spacer
  misc_feature (24)..(24): n stands for hexaethylene glycol spacer
  misc_feature (14)..(18): 2'-deoxy-2'-Amino
  misc_feature (27)..(27): 2'deoxy-2'-Amino
  misc_feature (38)..(38): n stands for inverted deoxyabasic derivative
aggucaugganucccuucaagganuccgggaacucccn

SEQ ID NO: 9401 - RNA, 38 nt, Artificial Sequence
  Description of Artificial Sequence:  Enzymatic Nucleic acid
  misc_feature (1)..(10): 2'-O-Methyl
  misc_feature (12)..(13): 2'-O-Methyl
  misc_feature (19)..(23): 2'-O-Methyl
  misc_feature (25)..(26): 2'-O-Methyl
  misc_feature (31)..(37): 2'-O-Methyl
  misc_feature (1)..(4): Phosphorothioate 3'-Internucleotide Linkage
  misc_feature (11)..(11): n stands for hexaethylene glycol spacer
  misc_feature (24)..(24): n stands for hexaethylene glycol spacer
  misc_feature (14)..(18): 2'-deoxy-2'-Amino
  misc_feature (27)..(27): 2'deoxy-2'-Amino
  misc_feature (38)..(38): n stands for inverted deoxyabasic derivative
gugucgugganucccuucaagganuccggguaugcugn

SEQ ID NO: 9402 - RNA, 38 nt, Artificial Sequence
  Description of Artificial Sequence:  Enzymatic Nucleic acid
  misc_feature (1)..(10): 2'-O-Methyl
  misc_feature (12)..(13): 2'-O-Methyl
  misc_feature (19)..(23): 2'-O-Methyl
  misc_feature (25)..(26): 2'-O-Methyl
  misc_feature (31)..(37): 2'-O-Methyl
  misc_feature (1)..(4): Phosphorothioate 3'-Internucleotide Linkage
  misc_feature (11)..(11): n stands for hexaethylene glycol spacer
  misc_feature (24)..(24): n stands for hexaethylene glycol spacer
  misc_feature (14)..(18): 2'-deoxy-2'-Amino
  misc_feature (27)..(27): 2'deoxy-2'-Amino
  misc_feature (38)..(38): n stands for inverted deoxyabasic derivative
ggcgcgagganucccuucaagganuccgggccuuaggn

SEQ ID NO: 9403 - RNA, 38 nt, Artificial Sequence
  Description of Artificial Sequence:  Enzymatic Nucleic acid
  misc_feature (1)..(10): 2'-O-Methyl
  misc_feature (12)..(13): 2'-O-Methyl
  misc_feature (19)..(23): 2'-O-Methyl
  misc_feature (25)..(26): 2'-O-Methyl
  misc_feature (31)..(37): 2'-O-Methyl
  misc_feature (1)..(4): Phosphorothioate 3'-Internucleotide Linkage
  misc_feature (11)..(11): n stands for hexaethylene glycol spacer
  misc_feature (24)..(24): n stands for hexaethylene glycol spacer
  misc_feature (14)..(18): 2'-deoxy-2'-Amino
  misc_feature (27)..(27): 2'deoxy-2'-Amino
  misc_feature (38)..(38): n stands for inverted deoxyabasic derivative
ccguggugganucccuucaagganuccgggaugcuccn

SEQ ID NO: 9404 - RNA, 38 nt, Artificial Sequence
  Description of Artificial Sequence:  Enzymatic Nucleic acid
  misc_feature (1)..(10): 2'-O-Methyl
  misc_feature (12)..(13): 2'-O-Methyl
  misc_feature (15)..(16): 2'-O-Methyl
  misc_feature (21)..(23): 2'-O-Methyl
  misc_feature (25)..(26): 2'-O-Methyl
  misc_feature (31)..(37): 2'-O-Methyl
  misc_feature (1)..(4): Phosphorothioate 3'-Internucleotide Linkage
  misc_feature (11)..(11): n stands for hexaethylene glycol spacer
  misc_feature (24)..(24): n stands for hexaethylene glycol spacer
  misc_feature (14)..(14): 2'-deoxy-2'-Amino
  misc_feature (17)..(20): 2'-deoxy-2'-Amino
  misc_feature (27)..(27): 2'-deoxy-2'-Amino
  misc_feature (38)..(38): n stands for inverted deoxyabasic derivative
gcguggcgganuccaacuucgganuccggguacaaugn

SEQ ID NO: 9405 - RNA, 38 nt, Artificial Sequence
  Description of Artificial Sequence:  Enzymatic Nucleic acid
  misc_feature (1)..(10): 2'-O-Methyl
  misc_feature (12)..(13): 2'-O-Methyl
  misc_feature (15)..(16): 2'-O-Methyl
  misc_feature (21)..(23): 2'-O-Methyl
  misc_feature (25)..(26): 2'-O-Methyl
  misc_feature (31)..(37): 2'-O-Methyl
  misc_feature (1)..(4): Phosphorothioate 3'-Internucleotide Linkage
  misc_feature (11)..(11): n stands for hexaethylene glycol spacer
  misc_feature (24)..(24): n stands for hexaethylene glycol spacer
  misc_feature (14)..(14): 2'-deoxy-2'-Amino
  misc_feature (17)..(20): 2'-deoxy-2'-Amino
  misc_feature (27)..(27): 2'-deoxy-2'-Amino
  misc_feature (38)..(38): n stands for inverted deoxyabasic derivative
guacagcgganuccaacuucgganuccgggaguugcgn

SEQ ID NO: 9406 - RNA, 35 nt, Artificial Sequence
  Description of Artificial Sequence:  Enzymatic Nucleic acid
  misc_feature (1)..(7): 2'-O-Methyl
  misc_feature (11)..(11): 2'-O-Methyl
  misc_feature (13)..(25): 2'-O-Methyl
  misc_feature (27)..(28): 2'-O-Methyl
  misc_feature (30)..(34): 2'-O-Methyl
  misc_feature (1)..(4): Phosphorothioate 3'-Internucleotide Linkage
  misc_feature (8)..(8): 2'-deoxy-2'-C-allyl
  misc_feature (35)..(35): n stands for inverted deoxyabasic derivative
aucaugcugaugaggccguuaggccgaaagacaun

SEQ ID NO: 9407 - RNA, 37 nt, Artificial Sequence
  Description of Artificial Sequence:  Enzymatic Nucleic acid
  misc_feature (1)..(8): 2'-O-Methyl
  misc_feature (12)..(12): 2'-O-Methyl
  misc_feature (14)..(26): 2'-O-Methyl
  misc_feature (28)..(29): 2'-O-Methyl
  misc_feature (31)..(36): 2'-O-Methyl
  misc_feature (1)..(4): Phosphorothioate 3'-Internucleotide Linkage
  misc_feature (9)..(9): 2'-deoxy-2'-C-allyl
  misc_feature (37)..(37): n stands for inverted deoxyabasic derivative
gaucaugcugaugaggccguuaggccgaaagacaucn

SEQ ID NO: 9408 - RNA, 35 nt, Artificial Sequence
  Description of Artificial Sequence:  Enzymatic Nucleic acid
  misc_feature (1)..(7): 2'-O-Methyl
  misc_feature (11)..(11): 2'-O-Methyl
  misc_feature (13)..(25): 2'-O-Methyl
  misc_feature (27)..(28): 2'-O-Methyl
  misc_feature (30)..(34): 2'-O-Methyl
  misc_feature (1)..(4): Phosphorothioate 3'-Internucleotide Linkage
  misc_feature (8)..(8): 2'-deoxy-2'-C-allyl
  misc_feature (35)..(35): n stands for inverted deoxyabasic derivative
gaccaucugaugaggccguuaggccgaaaucaugn

SEQ ID NO: 9409 - RNA, 37 nt, Artificial Sequence
  Description of Artificial Sequence:  Enzymatic Nucleic acid
  misc_feature (1)..(8): 2'-O-Methyl
  misc_feature (12)..(12): 2'-O-Methyl
  misc_feature (14)..(26): 2'-O-Methyl
  misc_feature (28)..(29): 2'-O-Methyl
  misc_feature (31)..(36): 2'-O-Methyl
  misc_feature (1)..(4): Phosphorothioate 3'-Internucleotide Linkage
  misc_feature (9)..(9): 2'-deoxy-2'-C-allyl
  misc_feature (37)..(37): n stands for inverted deoxyabasic derivative
ugaccaucugaugaggccguuaggccgaaaucaugun

SEQ ID NO: 9410 - RNA, 37 nt, Artificial Sequence
  Description of Artificial Sequence:  Enzymatic Nucleic acid
  misc_feature (1)..(8): 2'-O-Methyl
  misc_feature (12)..(12): 2'-O-Methyl
  misc_feature (14)..(26): 2'-O-Methyl
  misc_feature (28)..(29): 2'-O-Methyl
  misc_feature (31)..(36): 2'-O-Methyl
  misc_feature (1)..(4): Phosphorothioate 3'-Internucleotide Linkage
  misc_feature (9)..(9): 2'-deoxy-2'-C-allyl
  misc_feature (37)..(37): n stands for inverted deoxyabasic derivative
ggacgcccugaugaggccguuaggccgaaacgaggun

SEQ ID NO: 9411 - RNA, 35 nt, Artificial Sequence
  Description of Artificial Sequence:  Enzymatic Nucleic acid
  misc_feature (1)..(7): 2'-O-Methyl
  misc_feature (11)..(11): 2'-O-Methyl
  misc_feature (13)..(25): 2'-O-Methyl
  misc_feature (27)..(28): 2'-O-Methyl
  misc_feature (30)..(34): 2'-O-Methyl
  misc_feature (1)..(4): Phosphorothioate 3'-Internucleotide Linkage
  misc_feature (8)..(8): 2'-deoxy-2'-C-allyl
  misc_feature (35)..(35): n stands for inverted deoxyabasic derivative
ccuccacugaugaggccguuaggccgaaagcccgn

SEQ ID NO: 9412 - RNA, 37 nt, Artificial Sequence
  Description of Artificial Sequence:  Enzymatic Nucleic acid
  misc_feature (1)..(8): 2'-O-Methyl
  misc_feature (12)..(12): 2'-O-Methyl
  misc_feature (14)..(26): 2'-O-Methyl
  misc_feature (28)..(29): 2'-O-Methyl
  misc_feature (31)..(36): 2'-O-Methyl
  misc_feature (1)..(4): Phosphorothioate 3'-Internucleotide Linkage
  misc_feature (9)..(9): 2'-deoxy-2'-C-allyl
  misc_feature (37)..(37): n stands for inverted deoxyabasic derivative
aggacaucugaugaggccguuaggccgaaaccagccn

SEQ ID NO: 9413 - RNA, 37 nt, Artificial Sequence
  Description of Artificial Sequence:  Enzymatic Nucleic acid
  misc_feature (1)..(8): 2'-O-Methyl
  misc_feature (12)..(12): 2'-O-Methyl
  misc_feature (14)..(26): 2'-O-Methyl
  misc_feature (28)..(29): 2'-O-Methyl
  misc_feature (31)..(36): 2'-O-Methyl
  misc_feature (1)..(4): Phosphorothioate 3'-Internucleotide Linkage
  misc_feature (9)..(9): 2'-deoxy-2'-C-allyl
  misc_feature (37)..(37): n stands for inverted deoxyabasic derivative
gaggacacugaugaggccguuaggccgaaaaccagcn

SEQ ID NO: 9414 - RNA, 37 nt, Artificial Sequence
  Description of Artificial Sequence:  Enzymatic Nucleic acid
  misc_feature (1)..(8): 2'-O-Methyl
  misc_feature (12)..(12): 2'-O-Methyl
  misc_feature (14)..(26): 2'-O-Methyl
  misc_feature (28)..(29): 2'-O-Methyl
  misc_feature (31)..(36): 2'-O-Methyl
  misc_feature (1)..(4): Phosphorothioate 3'-Internucleotide Linkage
  misc_feature (9)..(9): 2'-deoxy-2'-C-allyl
  misc_feature (37)..(37): n stands for inverted deoxyabasic derivative
gggcaaucugaugaggccguuaggccgaaaggacaun

SEQ ID NO: 9415 - RNA, 35 nt, Artificial Sequence
  Description of Artificial Sequence:  Enzymatic Nucleic acid
  misc_feature (1)..(7): 2'-O-Methyl
  misc_feature (11)..(11): 2'-O-Methyl
  misc_feature (13)..(25): 2'-O-Methyl
  misc_feature (27)..(28): 2'-O-Methyl
  misc_feature (30)..(34): 2'-O-Methyl
  misc_feature (1)..(4): Phosphorothioate 3'-Internucleotide Linkage
  misc_feature (8)..(8): 2'-deoxy-2'-C-allyl
  misc_feature (35)..(35): n stands for inverted deoxyabasic derivative
gagcaucugaugaggccguuaggccgaaagugggn

SEQ ID NO: 9416 - RNA, 37 nt, Artificial Sequence
  Description of Artificial Sequence:  Enzymatic Nucleic acid
  misc_feature (1)..(8): 2'-O-Methyl
  misc_feature (12)..(12): 2'-O-Methyl
  misc_feature (14)..(26): 2'-O-Methyl
  misc_feature (28)..(29): 2'-O-Methyl
  misc_feature (31)..(36): 2'-O-Methyl
  misc_feature (1)..(4): Phosphorothioate 3'-Internucleotide Linkage
  misc_feature (9)..(9): 2'-deoxy-2'-C-allyl
  misc_feature (37)..(37): n stands for inverted deoxyabasic derivative
gguuguacugaugaggccguuaggccgaaagcaugan

SEQ ID NO: 9417 - RNA, 35 nt, Artificial Sequence
  Description of Artificial Sequence:  Enzymatic Nucleic acid
  misc_feature (1)..(7): 2'-O-Methyl
  misc_feature (11)..(11): 2'-O-Methyl
  misc_feature (13)..(25): 2'-O-Methyl
  misc_feature (27)..(28): 2'-O-Methyl
  misc_feature (30)..(34): 2'-O-Methyl
  misc_feature (1)..(4): Phosphorothioate 3'-Internucleotide Linkage
  misc_feature (8)..(8): 2'-deoxy-2'-C-allyl
  misc_feature (35)..(35): n stands for inverted deoxyabasic derivative
uuccgucugaugaggccguuaggccgaaacacacn

SEQ ID NO: 9418 - RNA, 37 nt, Artificial Sequence
  Description of Artificial Sequence:  Enzymatic Nucleic acid
  misc_feature (1)..(8): 2'-O-Methyl
  misc_feature (12)..(12): 2'-O-Methyl
  misc_feature (14)..(26): 2'-O-Methyl
  misc_feature (28)..(29): 2'-O-Methyl
  misc_feature (31)..(36): 2'-O-Methyl
  misc_feature (1)..(4): Phosphorothioate 3'-Internucleotide Linkage
  misc_feature (9)..(9): 2'-deoxy-2'-C-allyl
  misc_feature (37)..(37): n stands for inverted deoxyabasic derivative
caauacccugaugaggccguuaggccgaaauuccgun

SEQ ID NO: 9419 - RNA, 35 nt, Artificial Sequence
  Description of Artificial Sequence:  Enzymatic Nucleic acid
  misc_feature (1)..(7): 2'-O-Methyl
  misc_feature (11)..(11): 2'-O-Methyl
  misc_feature (13)..(25): 2'-O-Methyl
  misc_feature (27)..(28): 2'-O-Methyl
  misc_feature (30)..(34): 2'-O-Methyl
  misc_feature (1)..(4): Phosphorothioate 3'-Internucleotide Linkage
  misc_feature (8)..(8): 2'-deoxy-2'-C-allyl
  misc_feature (35)..(35): n stands for inverted deoxyabasic derivative
ugugugcugaugaggccguuaggccgaaaggagun

SEQ ID NO: 9420 - RNA, 37 nt, Artificial Sequence
  Description of Artificial Sequence:  Enzymatic Nucleic acid
  misc_feature (1)..(8): 2'-O-Methyl
  misc_feature (12)..(12): 2'-O-Methyl
  misc_feature (14)..(26): 2'-O-Methyl
  misc_feature (28)..(29): 2'-O-Methyl
  misc_feature (31)..(36): 2'-O-Methyl
  misc_feature (1)..(4): Phosphorothioate 3'-Internucleotide Linkage
  misc_feature (9)..(9): 2'-deoxy-2'-C-allyl
  misc_feature (37)..(37): n stands for inverted deoxyabasic derivative
ggaggagcugaugaggccguuaggccgaaaugugugn

SEQ ID NO: 9421 - RNA, 37 nt, Artificial Sequence
  Description of Artificial Sequence:  Enzymatic Nucleic acid
  misc_feature (1)..(8): 2'-O-Methyl
  misc_feature (12)..(12): 2'-O-Methyl
  misc_feature (14)..(26): 2'-O-Methyl
  misc_feature (28)..(29): 2'-O-Methyl
  misc_feature (31)..(36): 2'-O-Methyl
  misc_feature (1)..(4): Phosphorothioate 3'-Internucleotide Linkage
  misc_feature (9)..(9): 2'-deoxy-2'-C-allyl
  misc_feature (37)..(37): n stands for inverted deoxyabasic derivative
agaggagcugaugaggccguuaggccgaaaguaugun

SEQ ID NO: 9422 - RNA, 37 nt, Artificial Sequence
  Description of Artificial Sequence:  Enzymatic Nucleic acid
  misc_feature (1)..(8): 2'-O-Methyl
  misc_feature (12)..(12): 2'-O-Methyl
  misc_feature (14)..(26): 2'-O-Methyl
  misc_feature (28)..(29): 2'-O-Methyl
  misc_feature (31)..(36): 2'-O-Methyl
  misc_feature (1)..(4): Phosphorothioate 3'-Internucleotide Linkage
  misc_feature (9)..(9): 2'-deoxy-2'-C-allyl
  misc_feature (37)..(37): n stands for inverted deoxyabasic derivative
ugauuuccugaugaggccguuaggccgaaagguucun

SEQ ID NO: 9423 - RNA, 37 nt, Artificial Sequence
  Description of Artificial Sequence:  Enzymatic Nucleic acid
  misc_feature (1)..(8): 2'-O-Methyl
  misc_feature (12)..(12): 2'-O-Methyl
  misc_feature (14)..(26): 2'-O-Methyl
  misc_feature (28)..(29): 2'-O-Methyl
  misc_feature (31)..(36): 2'-O-Methyl
  misc_feature (1)..(4): Phosphorothioate 3'-Internucleotide Linkage
  misc_feature (9)..(9): 2'-deoxy-2'-C-allyl
  misc_feature (37)..(37): n stands for inverted deoxyabasic derivative
cgacugccugaugaggccguuaggccgaaagagaaan

SEQ ID NO: 9424 - RNA, 35 nt, Artificial Sequence
  Description of Artificial Sequence:  Enzymatic Nucleic acid
  misc_feature (1)..(7): 2'-O-Methyl
  misc_feature (11)..(11): 2'-O-Methyl
  misc_feature (13)..(25): 2'-O-Methyl
  misc_feature (27)..(28): 2'-O-Methyl
  misc_feature (30)..(34): 2'-O-Methyl
  misc_feature (1)..(4): Phosphorothioate 3'-Internucleotide Linkage
  misc_feature (8)..(8): 2'-deoxy-2'-C-allyl
  misc_feature (35)..(35): n stands for inverted deoxyabasic derivative
gcugaccugaugaggccguuaggccgaaacugcan

SEQ ID NO: 9425 - RNA, 35 nt, Artificial Sequence
  Description of Artificial Sequence:  Enzymatic Nucleic acid
  misc_feature (1)..(7): 2'-O-Methyl
  misc_feature (11)..(11): 2'-O-Methyl
  misc_feature (13)..(25): 2'-O-Methyl
  misc_feature (27)..(28): 2'-O-Methyl
  misc_feature (30)..(34): 2'-O-Methyl
  misc_feature (1)..(4): Phosphorothioate 3'-Internucleotide Linkage
  misc_feature (8)..(8): 2'-deoxy-2'-C-allyl
  misc_feature (35)..(35): n stands for inverted deoxyabasic derivative
gguccccugaugaggccguuaggccgaaaacagun

SEQ ID NO: 9426 - RNA, 37 nt, Artificial Sequence
  Description of Artificial Sequence:  Enzymatic Nucleic acid
  misc_feature (1)..(8): 2'-O-Methyl
  misc_feature (12)..(12): 2'-O-Methyl
  misc_feature (14)..(26): 2'-O-Methyl
  misc_feature (28)..(29): 2'-O-Methyl
  misc_feature (31)..(36): 2'-O-Methyl
  misc_feature (1)..(4): Phosphorothioate 3'-Internucleotide Linkage
  misc_feature (9)..(9): 2'-deoxy-2'-C-allyl
  misc_feature (37)..(37): n stands for inverted deoxyabasic derivative
ucuccaccugaugaggccguuaggccgaaaacucccn

SEQ ID NO: 9427 - RNA, 37 nt, Artificial Sequence
  Description of Artificial Sequence:  Enzymatic Nucleic acid
  misc_feature (1)..(8): 2'-O-Methyl
  misc_feature (12)..(12): 2'-O-Methyl
  misc_feature (14)..(26): 2'-O-Methyl
  misc_feature (28)..(29): 2'-O-Methyl
  misc_feature (31)..(36): 2'-O-Methyl
  misc_feature (1)..(4): Phosphorothioate 3'-Internucleotide Linkage
  misc_feature (9)..(9): 2'-deoxy-2'-C-allyl
  misc_feature (37)..(37): n stands for inverted deoxyabasic derivative
ggccguccugaugaggccguuaggccgaaauguagun

SEQ ID NO: 9428 - RNA, 37 nt, Artificial Sequence
  Description of Artificial Sequence:  Enzymatic Nucleic acid
  misc_feature (1)..(8): 2'-O-Methyl
  misc_feature (12)..(12): 2'-O-Methyl
  misc_feature (14)..(26): 2'-O-Methyl
  misc_feature (28)..(29): 2'-O-Methyl
  misc_feature (31)..(36): 2'-O-Methyl
  misc_feature (1)..(4): Phosphorothioate 3'-Internucleotide Linkage
  misc_feature (9)..(9): 2'-deoxy-2'-C-allyl
  misc_feature (37)..(37): n stands for inverted deoxyabasic derivative
gucugcgcugaugaggccguuaggccgaaacuuccan

SEQ ID NO: 9429 - RNA, 37 nt, Artificial Sequence
  Description of Artificial Sequence:  Enzymatic Nucleic acid
  misc_feature (1)..(8): 2'-O-Methyl
  misc_feature (12)..(12): 2'-O-Methyl
  misc_feature (14)..(26): 2'-O-Methyl
  misc_feature (28)..(29): 2'-O-Methyl
  misc_feature (31)..(36): 2'-O-Methyl
  misc_feature (1)..(4): Phosphorothioate 3'-Internucleotide Linkage
  misc_feature (9)..(9): 2'-deoxy-2'-C-allyl
  misc_feature (37)..(37): n stands for inverted deoxyabasic derivative
uccgaaccugaugaggccguuaggccgaaauguggcn

SEQ ID NO: 9430 - RNA, 37 nt, Artificial Sequence
  Description of Artificial Sequence:  Enzymatic Nucleic acid
  misc_feature (1)..(8): 2'-O-Methyl
  misc_feature (12)..(12): 2'-O-Methyl
  misc_feature (14)..(26): 2'-O-Methyl
  misc_feature (28)..(29): 2'-O-Methyl
  misc_feature (31)..(36): 2'-O-Methyl
  misc_feature (1)..(4): Phosphorothioate 3'-Internucleotide Linkage
  misc_feature (9)..(9): 2'-deoxy-2'-C-allyl
  misc_feature (37)..(37): n stands for inverted deoxyabasic derivative
cugggugcugaugaggccguuaggccgaaaagaggcn

SEQ ID NO: 9431 - RNA, 37 nt, Artificial Sequence
  Description of Artificial Sequence:  Enzymatic Nucleic acid
  misc_feature (1)..(8): 2'-O-Methyl
  misc_feature (12)..(12): 2'-O-Methyl
  misc_feature (14)..(26): 2'-O-Methyl
  misc_feature (28)..(29): 2'-O-Methyl
  misc_feature (31)..(36): 2'-O-Methyl
  misc_feature (1)..(4): Phosphorothioate 3'-Internucleotide Linkage
  misc_feature (9)..(9): 2'-deoxy-2'-C-allyl
  misc_feature (37)..(37): n stands for inverted deoxyabasic derivative
uuccuuccugaugaggccguuaggccgaaagauccun

SEQ ID NO: 9432 - RNA, 37 nt, Artificial Sequence
  Description of Artificial Sequence:  Enzymatic Nucleic acid
  misc_feature (1)..(8): 2'-O-Methyl
  misc_feature (12)..(12): 2'-O-Methyl
  misc_feature (14)..(26): 2'-O-Methyl
  misc_feature (28)..(29): 2'-O-Methyl
  misc_feature (31)..(36): 2'-O-Methyl
  misc_feature (1)..(4): Phosphorothioate 3'-Internucleotide Linkage
  misc_feature (9)..(9): 2'-deoxy-2'-C-allyl
  misc_feature (37)..(37): n stands for inverted deoxyabasic derivative
ucccuuacugaugaggccguuaggccgaaacaccgun

SEQ ID NO: 9433 - RNA, 37 nt, Artificial Sequence
  Description of Artificial Sequence:  Enzymatic Nucleic acid
  misc_feature (1)..(8): 2'-O-Methyl
  misc_feature (12)..(12): 2'-O-Methyl
  misc_feature (14)..(26): 2'-O-Methyl
  misc_feature (28)..(29): 2'-O-Methyl
  misc_feature (31)..(36): 2'-O-Methyl
  misc_feature (1)..(4): Phosphorothioate 3'-Internucleotide Linkage
  misc_feature (9)..(9): 2'-deoxy-2'-C-allyl
  misc_feature (37)..(37): n stands for inverted deoxyabasic derivative
agucccucugaugaggccguuaggccgaaauacaccn

SEQ ID NO: 9434 - RNA, 37 nt, Artificial Sequence
  Description of Artificial Sequence:  Enzymatic Nucleic acid
  misc_feature (1)..(8): 2'-O-Methyl
  misc_feature (12)..(12): 2'-O-Methyl
  misc_feature (14)..(26): 2'-O-Methyl
  misc_feature (28)..(29): 2'-O-Methyl
  misc_feature (31)..(36): 2'-O-Methyl
  misc_feature (1)..(4): Phosphorothioate 3'-Internucleotide Linkage
  misc_feature (9)..(9): 2'-deoxy-2'-C-allyl
  misc_feature (37)..(37): n stands for inverted deoxyabasic derivative
uccuugacugaugaggccguuaggccgaaagcgacgn

SEQ ID NO: 9435 - RNA, 37 nt, Artificial Sequence
  Description of Artificial Sequence:  Enzymatic Nucleic acid
  misc_feature (1)..(8): 2'-O-Methyl
  misc_feature (12)..(12): 2'-O-Methyl
  misc_feature (14)..(26): 2'-O-Methyl
  misc_feature (28)..(29): 2'-O-Methyl
  misc_feature (31)..(36): 2'-O-Methyl
  misc_feature (1)..(4): Phosphorothioate 3'-Internucleotide Linkage
  misc_feature (9)..(9): 2'-deoxy-2'-C-allyl
  misc_feature (37)..(37): n stands for inverted deoxyabasic derivative
gagccaacugaugaggccguuaggccgaaauugucun

SEQ ID NO: 9436 - RNA, 37 nt, Artificial Sequence
  Description of Artificial Sequence:  Enzymatic Nucleic acid
  misc_feature (1)..(8): 2'-O-Methyl
  misc_feature (12)..(12): 2'-O-Methyl
  misc_feature (14)..(26): 2'-O-Methyl
  misc_feature (28)..(29): 2'-O-Methyl
  misc_feature (31)..(36): 2'-O-Methyl
  misc_feature (1)..(4): Phosphorothioate 3'-Internucleotide Linkage
  misc_feature (9)..(9): 2'-deoxy-2'-C-allyl
  misc_feature (37)..(37): n stands for inverted deoxyabasic derivative
gagcaggcugaugaggccguuaggccgaaacugggan

SEQ ID NO: 9437 - RNA, 37 nt, Artificial Sequence
  Description of Artificial Sequence:  Enzymatic Nucleic acid
  misc_feature (1)..(8): 2'-O-Methyl
  misc_feature (12)..(12): 2'-O-Methyl
  misc_feature (14)..(26): 2'-O-Methyl
  misc_feature (28)..(29): 2'-O-Methyl
  misc_feature (31)..(36): 2'-O-Methyl
  misc_feature (1)..(4): Phosphorothioate 3'-Internucleotide Linkage
  misc_feature (9)..(9): 2'-deoxy-2'-C-allyl
  misc_feature (37)..(37): n stands for inverted deoxyabasic derivative
cuccaagcugaugaggccguuaggccgaaaguucaun

SEQ ID NO: 9438 - RNA, 35 nt, Artificial Sequence
  Description of Artificial Sequence:  Enzymatic Nucleic acid
  misc_feature (1)..(7): 2'-O-Methyl
  misc_feature (11)..(11): 2'-O-Methyl
  misc_feature (13)..(25): 2'-O-Methyl
  misc_feature (27)..(28): 2'-O-Methyl
  misc_feature (30)..(34): 2'-O-Methyl
  misc_feature (1)..(4): Phosphorothioate 3'-Internucleotide Linkage
  misc_feature (8)..(8): 2'-deoxy-2'-C-allyl
  misc_feature (35)..(35): n stands for inverted deoxyabasic derivative
uccucccugaugaggccguuaggccgaaaguagun

SEQ ID NO: 9439 - RNA, 37 nt, Artificial Sequence
  Description of Artificial Sequence:  Enzymatic Nucleic acid
  misc_feature (1)..(8): 2'-O-Methyl
  misc_feature (12)..(12): 2'-O-Methyl
  misc_feature (14)..(26): 2'-O-Methyl
  misc_feature (28)..(29): 2'-O-Methyl
  misc_feature (31)..(36): 2'-O-Methyl
  misc_feature (1)..(4): Phosphorothioate 3'-Internucleotide Linkage
  misc_feature (9)..(9): 2'-deoxy-2'-C-allyl
  misc_feature (37)..(37): n stands for inverted deoxyabasic derivative
guggguacugaugaggccguuaggccgaaagauucun

SEQ ID NO: 9440 - RNA, 37 nt, Artificial Sequence
  Description of Artificial Sequence:  Enzymatic Nucleic acid
  misc_feature (1)..(8): 2'-O-Methyl
  misc_feature (12)..(12): 2'-O-Methyl
  misc_feature (14)..(26): 2'-O-Methyl
  misc_feature (28)..(29): 2'-O-Methyl
  misc_feature (31)..(36): 2'-O-Methyl
  misc_feature (1)..(4): Phosphorothioate 3'-Internucleotide Linkage
  misc_feature (9)..(9): 2'-deoxy-2'-C-allyl
  misc_feature (37)..(37): n stands for inverted deoxyabasic derivative
uggaucccugaugaggccguuaggccgaaaaggucan

SEQ ID NO: 9441 - RNA, 37 nt, Artificial Sequence
  Description of Artificial Sequence:  Enzymatic Nucleic acid
  misc_feature (1)..(8): 2'-O-Methyl
  misc_feature (12)..(12): 2'-O-Methyl
  misc_feature (14)..(26): 2'-O-Methyl
  misc_feature (28)..(29): 2'-O-Methyl
  misc_feature (31)..(36): 2'-O-Methyl
  misc_feature (1)..(4): Phosphorothioate 3'-Internucleotide Linkage
  misc_feature (9)..(9): 2'-deoxy-2'-C-allyl
  misc_feature (37)..(37): n stands for inverted deoxyabasic derivative
ucuguagcugaugaggccguuaggccgaaacuuggcn

SEQ ID NO: 9442 - RNA, 37 nt, Artificial Sequence
  Description of Artificial Sequence:  Enzymatic Nucleic acid
  misc_feature (1)..(8): 2'-O-Methyl
  misc_feature (12)..(12): 2'-O-Methyl
  misc_feature (14)..(26): 2'-O-Methyl
  misc_feature (28)..(29): 2'-O-Methyl
  misc_feature (31)..(36): 2'-O-Methyl
  misc_feature (1)..(4): Phosphorothioate 3'-Internucleotide Linkage
  misc_feature (9)..(9): 2'-deoxy-2'-C-allyl
  misc_feature (37)..(37): n stands for inverted deoxyabasic derivative
gugggaucugaugaggccguuaggccgaaagguacun

SEQ ID NO: 9443 - RNA, 37 nt, Artificial Sequence
  Description of Artificial Sequence:  Enzymatic Nucleic acid
  misc_feature (1)..(8): 2'-O-Methyl
  misc_feature (12)..(12): 2'-O-Methyl
  misc_feature (14)..(26): 2'-O-Methyl
  misc_feature (28)..(29): 2'-O-Methyl
  misc_feature (31)..(36): 2'-O-Methyl
  misc_feature (1)..(4): Phosphorothioate 3'-Internucleotide Linkage
  misc_feature (9)..(9): 2'-deoxy-2'-C-allyl
  misc_feature (37)..(37): n stands for inverted deoxyabasic derivative
cugggagcugaugaggccguuaggccgaaaaggugun

SEQ ID NO: 9444 - RNA, 35 nt, Artificial Sequence
  Description of Artificial Sequence:  Enzymatic Nucleic acid
  misc_feature (1)..(7): 2'-O-Methyl
  misc_feature (11)..(11): 2'-O-Methyl
  misc_feature (13)..(25): 2'-O-Methyl
  misc_feature (27)..(28): 2'-O-Methyl
  misc_feature (30)..(34): 2'-O-Methyl
  misc_feature (1)..(4): Phosphorothioate 3'-Internucleotide Linkage
  misc_feature (8)..(8): 2'-deoxy-2'-C-allyl
  misc_feature (35)..(35): n stands for inverted deoxyabasic derivative
ggaacgcugaugaggccguuaggccgaaacuggun

SEQ ID NO: 9445 - RNA, 35 nt, Artificial Sequence
  Description of Artificial Sequence:  Enzymatic Nucleic acid
  misc_feature (1)..(7): 2'-O-Methyl
  misc_feature (11)..(11): 2'-O-Methyl
  misc_feature (13)..(25): 2'-O-Methyl
  misc_feature (27)..(28): 2'-O-Methyl
  misc_feature (30)..(34): 2'-O-Methyl
  misc_feature (1)..(4): Phosphorothioate 3'-Internucleotide Linkage
  misc_feature (8)..(8): 2'-deoxy-2'-C-allyl
  misc_feature (35)..(35): n stands for inverted deoxyabasic derivative
uuugggcugaugaggccguuaggccgaaacggacn

SEQ ID NO: 9446 - RNA, 35 nt, Artificial Sequence
  Description of Artificial Sequence:  Enzymatic Nucleic acid
  misc_feature (1)..(7): 2'-O-Methyl
  misc_feature (11)..(11): 2'-O-Methyl
  misc_feature (13)..(25): 2'-O-Methyl
  misc_feature (27)..(28): 2'-O-Methyl
  misc_feature (30)..(34): 2'-O-Methyl
  misc_feature (1)..(4): Phosphorothioate 3'-Internucleotide Linkage
  misc_feature (8)..(8): 2'-deoxy-2'-C-allyl
  misc_feature (35)..(35): n stands for inverted deoxyabasic derivative
uccuggcugaugaggccguuaggccgaaagugugn

SEQ ID NO: 9447 - RNA, 37 nt, Artificial Sequence
  Description of Artificial Sequence:  Enzymatic Nucleic acid
  misc_feature (1)..(8): 2'-O-Methyl
  misc_feature (12)..(12): 2'-O-Methyl
  misc_feature (14)..(26): 2'-O-Methyl
  misc_feature (28)..(29): 2'-O-Methyl
  misc_feature (31)..(36): 2'-O-Methyl
  misc_feature (1)..(4): Phosphorothioate 3'-Internucleotide Linkage
  misc_feature (9)..(9): 2'-deoxy-2'-C-allyl
  misc_feature (37)..(37): n stands for inverted deoxyabasic derivative
ggcuguccugaugaggccguuaggccgaaaaugugcn

SEQ ID NO: 9448 - RNA, 37 nt, Artificial Sequence
  Description of Artificial Sequence:  Enzymatic Nucleic acid
  misc_feature (1)..(8): 2'-O-Methyl
  misc_feature (12)..(12): 2'-O-Methyl
  misc_feature (14)..(26): 2'-O-Methyl
  misc_feature (28)..(29): 2'-O-Methyl
  misc_feature (31)..(36): 2'-O-Methyl
  misc_feature (1)..(4): Phosphorothioate 3'-Internucleotide Linkage
  misc_feature (9)..(9): 2'-deoxy-2'-C-allyl
  misc_feature (37)..(37): n stands for inverted deoxyabasic derivative
ccuuaggcugaugaggccguuaggccgaaauucugcn

SEQ ID NO: 9449 - RNA, 35 nt, Artificial Sequence
  Description of Artificial Sequence:  Enzymatic Nucleic acid
  misc_feature (1)..(7): 2'-O-Methyl
  misc_feature (11)..(11): 2'-O-Methyl
  misc_feature (13)..(25): 2'-O-Methyl
  misc_feature (27)..(28): 2'-O-Methyl
  misc_feature (30)..(34): 2'-O-Methyl
  misc_feature (1)..(4): Phosphorothioate 3'-Internucleotide Linkage
  misc_feature (8)..(8): 2'-deoxy-2'-C-allyl
  misc_feature (35)..(35): n stands for inverted deoxyabasic derivative
aggacacugaugaggccguuaggccgaaaaccagn

SEQ ID NO: 9450 - RNA, 37 nt, Artificial Sequence
  Description of Artificial Sequence:  Enzymatic Nucleic acid
  misc_feature (1)..(8): 2'-O-Methyl
  misc_feature (12)..(12): 2'-O-Methyl
  misc_feature (14)..(26): 2'-O-Methyl
  misc_feature (28)..(29): 2'-O-Methyl
  misc_feature (31)..(36): 2'-O-Methyl
  misc_feature (1)..(4): Phosphorothioate 3'-Internucleotide Linkage
  misc_feature (9)..(9): 2'-deoxy-2'-C-allyl
  misc_feature (37)..(37): n stands for inverted deoxyabasic derivative
uuacgggcugaugaggccguuaggccgaaacacuucn

SEQ ID NO: 9451 - RNA, 37 nt, Artificial Sequence
  Description of Artificial Sequence:  Enzymatic Nucleic acid
  misc_feature (1)..(8): 2'-O-Methyl
  misc_feature (12)..(12): 2'-O-Methyl
  misc_feature (14)..(26): 2'-O-Methyl
  misc_feature (28)..(29): 2'-O-Methyl
  misc_feature (31)..(36): 2'-O-Methyl
  misc_feature (1)..(4): Phosphorothioate 3'-Internucleotide Linkage
  misc_feature (9)..(9): 2'-deoxy-2'-C-allyl
  misc_feature (37)..(37): n stands for inverted deoxyabasic derivative
uguuuaacugaugaggccguuaggccgaaauucguan

SEQ ID NO: 9452 - RNA, 35 nt, Artificial Sequence
  Description of Artificial Sequence:  Enzymatic Nucleic acid
  misc_feature (1)..(7): 2'-O-Methyl
  misc_feature (11)..(11): 2'-O-Methyl
  misc_feature (13)..(25): 2'-O-Methyl
  misc_feature (27)..(28): 2'-O-Methyl
  misc_feature (30)..(34): 2'-O-Methyl
  misc_feature (1)..(4): Phosphorothioate 3'-Internucleotide Linkage
  misc_feature (8)..(8): 2'-deoxy-2'-C-allyl
  misc_feature (35)..(35): n stands for inverted deoxyabasic derivative
gaggagcugaugaggccguuaggccgaaaugugun

SEQ ID NO: 9453 - RNA, 35 nt, Artificial Sequence
  Description of Artificial Sequence:  Enzymatic Nucleic acid
  misc_feature (1)..(7): 2'-O-Methyl
  misc_feature (11)..(11): 2'-O-Methyl
  misc_feature (13)..(25): 2'-O-Methyl
  misc_feature (27)..(28): 2'-O-Methyl
  misc_feature (30)..(34): 2'-O-Methyl
  misc_feature (1)..(4): Phosphorothioate 3'-Internucleotide Linkage
  misc_feature (8)..(8): 2'-deoxy-2'-C-allyl
  misc_feature (35)..(35): n stands for inverted deoxyabasic derivative
ccagagcugaugaggccguuaggccgaaaggagun

SEQ ID NO: 9454 - RNA, 37 nt, Artificial Sequence
  Description of Artificial Sequence:  Enzymatic Nucleic acid
  misc_feature (1)..(8): 2'-O-Methyl
  misc_feature (12)..(12): 2'-O-Methyl
  misc_feature (14)..(26): 2'-O-Methyl
  misc_feature (28)..(29): 2'-O-Methyl
  misc_feature (31)..(36): 2'-O-Methyl
  misc_feature (1)..(4): Phosphorothioate 3'-Internucleotide Linkage
  misc_feature (9)..(9): 2'-deoxy-2'-C-allyl
  misc_feature (37)..(37): n stands for inverted deoxyabasic derivative
acugcaacugaugaggccguuaggccgaaagaaaacn

SEQ ID NO: 9455 - RNA, 37 nt, Artificial Sequence
  Description of Artificial Sequence:  Enzymatic Nucleic acid
  misc_feature (1)..(8): 2'-O-Methyl
  misc_feature (12)..(12): 2'-O-Methyl
  misc_feature (14)..(26): 2'-O-Methyl
  misc_feature (28)..(29): 2'-O-Methyl
  misc_feature (31)..(36): 2'-O-Methyl
  misc_feature (1)..(4): Phosphorothioate 3'-Internucleotide Linkage
  misc_feature (9)..(9): 2'-deoxy-2'-C-allyl
  misc_feature (37)..(37): n stands for inverted deoxyabasic derivative
ucugugucugaugaggccguuaggccgaaaaauugan

SEQ ID NO: 9456 - RNA, 37 nt, Artificial Sequence
  Description of Artificial Sequence:  Enzymatic Nucleic acid
  misc_feature (1)..(8): 2'-O-Methyl
  misc_feature (12)..(12): 2'-O-Methyl
  misc_feature (14)..(26): 2'-O-Methyl
  misc_feature (28)..(29): 2'-O-Methyl
  misc_feature (31)..(36): 2'-O-Methyl
  misc_feature (1)..(4): Phosphorothioate 3'-Internucleotide Linkage
  misc_feature (9)..(9): 2'-deoxy-2'-C-allyl
  misc_feature (37)..(37): n stands for inverted deoxyabasic derivative
acugguucugaugaggccguuaggccgaaauguauun

SEQ ID NO: 9457 - RNA, 37 nt, Artificial Sequence
  Description of Artificial Sequence:  Enzymatic Nucleic acid
  misc_feature (1)..(8): 2'-O-Methyl
  misc_feature (12)..(12): 2'-O-Methyl
  misc_feature (14)..(26): 2'-O-Methyl
  misc_feature (28)..(29): 2'-O-Methyl
  misc_feature (31)..(36): 2'-O-Methyl
  misc_feature (1)..(4): Phosphorothioate 3'-Internucleotide Linkage
  misc_feature (9)..(9): 2'-deoxy-2'-C-allyl
  misc_feature (37)..(37): n stands for inverted deoxyabasic derivative
gcuccaacugaugaggccguuaggccgaaaaauucan

SEQ ID NO: 9458 - RNA, 35 nt, Artificial Sequence
  Description of Artificial Sequence:  Enzymatic Nucleic acid
  misc_feature (1)..(7): 2'-O-Methyl
  misc_feature (11)..(11): 2'-O-Methyl
  misc_feature (13)..(25): 2'-O-Methyl
  misc_feature (27)..(28): 2'-O-Methyl
  misc_feature (30)..(34): 2'-O-Methyl
  misc_feature (1)..(4): Phosphorothioate 3'-Internucleotide Linkage
  misc_feature (8)..(8): 2'-deoxy-2'-C-allyl
  misc_feature (29)..(29): n stands for inosine
  misc_feature (35)..(35): n stands for inverted deoxyabasic derivative
ucccaacugaugaggccguuaggccgaanaccacn

SEQ ID NO: 9459 - RNA, 35 nt, Artificial Sequence
  Description of Artificial Sequence:  Enzymatic Nucleic acid
  misc_feature (1)..(7): 2'-O-Methyl
  misc_feature (11)..(11): 2'-O-Methyl
  misc_feature (13)..(25): 2'-O-Methyl
  misc_feature (27)..(28): 2'-O-Methyl
  misc_feature (30)..(34): 2'-O-Methyl
  misc_feature (1)..(4): Phosphorothioate 3'-Internucleotide Linkage
  misc_feature (8)..(8): 2'-deoxy-2'-C-allyl
  misc_feature (29)..(29): n stands for inosine
  misc_feature (35)..(35): n stands for inverted deoxyabasic derivative
gcagcccugaugaggccguuaggccgaancagcan

SEQ ID NO: 9460 - RNA, 35 nt, Artificial Sequence
  Description of Artificial Sequence:  Enzymatic Nucleic acid
  misc_feature (1)..(7): 2'-O-Methyl
  misc_feature (11)..(11): 2'-O-Methyl
  misc_feature (13)..(25): 2'-O-Methyl
  misc_feature (27)..(28): 2'-O-Methyl
  misc_feature (30)..(34): 2'-O-Methyl
  misc_feature (1)..(4): Phosphorothioate 3'-Internucleotide Linkage
  misc_feature (8)..(8): 2'-deoxy-2'-C-allyl
  misc_feature (29)..(29): n stands for inosine
  misc_feature (35)..(35): n stands for inverted deoxyabasic derivative
ggcagacugaugaggccguuaggccgaancccagn

SEQ ID NO: 9461 - RNA, 35 nt, Artificial Sequence
  Description of Artificial Sequence:  Enzymatic Nucleic acid
  misc_feature (1)..(7): 2'-O-Methyl
  misc_feature (11)..(11): 2'-O-Methyl
  misc_feature (13)..(25): 2'-O-Methyl
  misc_feature (27)..(28): 2'-O-Methyl
  misc_feature (30)..(34): 2'-O-Methyl
  misc_feature (1)..(4): Phosphorothioate 3'-Internucleotide Linkage
  misc_feature (8)..(8): 2'-deoxy-2'-C-allyl
  misc_feature (29)..(29): n stands for inosine
  misc_feature (35)..(35): n stands for inverted deoxyabasic derivative
cacucucugaugaggccguuaggccgaanugggun

SEQ ID NO: 9462 - RNA, 37 nt, Artificial Sequence
  Description of Artificial Sequence:  Enzymatic Nucleic acid
  misc_feature (1)..(8): 2'-O-Methyl
  misc_feature (12)..(12): 2'-O-Methyl
  misc_feature (14)..(26): 2'-O-Methyl
  misc_feature (28)..(29): 2'-O-Methyl
  misc_feature (31)..(36): 2'-O-Methyl
  misc_feature (1)..(4): Phosphorothioate 3'-Internucleotide Linkage
  misc_feature (9)..(9): 2'-deoxy-2'-C-allyl
  misc_feature (30)..(30): n stands for inosine
  misc_feature (37)..(37): n stands for inverted deoxyabasic derivative
aucacuccugaugaggccguuaggccgaangugggun

SEQ ID NO: 9463 - RNA, 35 nt, Artificial Sequence
  Description of Artificial Sequence:  Enzymatic Nucleic acid
  misc_feature (1)..(7): 2'-O-Methyl
  misc_feature (11)..(11): 2'-O-Methyl
  misc_feature (13)..(25): 2'-O-Methyl
  misc_feature (27)..(28): 2'-O-Methyl
  misc_feature (30)..(34): 2'-O-Methyl
  misc_feature (1)..(4): Phosphorothioate 3'-Internucleotide Linkage
  misc_feature (8)..(8): 2'-deoxy-2'-C-allyl
  misc_feature (29)..(29): n stands for inosine
  misc_feature (35)..(35): n stands for inverted deoxyabasic derivative
ucaugucugaugaggccguuaggccgaanacaucn

SEQ ID NO: 9464 - RNA, 35 nt, Artificial Sequence
  Description of Artificial Sequence:  Enzymatic Nucleic acid
  misc_feature (1)..(7): 2'-O-Methyl
  misc_feature (11)..(11): 2'-O-Methyl
  misc_feature (13)..(25): 2'-O-Methyl
  misc_feature (27)..(28): 2'-O-Methyl
  misc_feature (30)..(34): 2'-O-Methyl
  misc_feature (1)..(4): Phosphorothioate 3'-Internucleotide Linkage
  misc_feature (8)..(8): 2'-deoxy-2'-C-allyl
  misc_feature (29)..(29): n stands for inosine
  misc_feature (35)..(35): n stands for inverted deoxyabasic derivative
ugaucacugaugaggccguuaggccgaanuagacn

SEQ ID NO: 9465 - RNA, 35 nt, Artificial Sequence
  Description of Artificial Sequence:  Enzymatic Nucleic acid
  misc_feature (1)..(7): 2'-O-Methyl
  misc_feature (11)..(11): 2'-O-Methyl
  misc_feature (13)..(25): 2'-O-Methyl
  misc_feature (27)..(28): 2'-O-Methyl
  misc_feature (30)..(34): 2'-O-Methyl
  misc_feature (1)..(4): Phosphorothioate 3'-Internucleotide Linkage
  misc_feature (8)..(8): 2'-deoxy-2'-C-allyl
  misc_feature (29)..(29): n stands for inosine
  misc_feature (35)..(35): n stands for inverted deoxyabasic derivative
ugaccacugaugaggccguuaggccgaanaucaun

SEQ ID NO: 9466 - RNA, 35 nt, Artificial Sequence
  Description of Artificial Sequence:  Enzymatic Nucleic acid
  misc_feature (1)..(7): 2'-O-Methyl
  misc_feature (11)..(11): 2'-O-Methyl
  misc_feature (13)..(25): 2'-O-Methyl
  misc_feature (27)..(28): 2'-O-Methyl
  misc_feature (30)..(34): 2'-O-Methyl
  misc_feature (1)..(4): Phosphorothioate 3'-Internucleotide Linkage
  misc_feature (8)..(8): 2'-deoxy-2'-C-allyl
  misc_feature (29)..(29): n stands for inosine
  misc_feature (35)..(35): n stands for inverted deoxyabasic derivative
agcgcucugaugaggccguuaggccgaangggucn

SEQ ID NO: 9467 - RNA, 37 nt, Artificial Sequence
  Description of Artificial Sequence:  Enzymatic Nucleic acid
  misc_feature (1)..(8): 2'-O-Methyl
  misc_feature (12)..(12): 2'-O-Methyl
  misc_feature (14)..(26): 2'-O-Methyl
  misc_feature (28)..(29): 2'-O-Methyl
  misc_feature (31)..(36): 2'-O-Methyl
  misc_feature (1)..(4): Phosphorothioate 3'-Internucleotide Linkage
  misc_feature (9)..(9): 2'-deoxy-2'-C-allyl
  misc_feature (30)..(30): n stands for inosine
  misc_feature (37)..(37): n stands for inverted deoxyabasic derivative
ucaauaccugaugaggccguuaggccgaangacggan

SEQ ID NO: 9468 - RNA, 35 nt, Artificial Sequence
  Description of Artificial Sequence:  Enzymatic Nucleic acid
  misc_feature (1)..(7): 2'-O-Methyl
  misc_feature (11)..(11): 2'-O-Methyl
  misc_feature (13)..(25): 2'-O-Methyl
  misc_feature (27)..(28): 2'-O-Methyl
  misc_feature (30)..(34): 2'-O-Methyl
  misc_feature (1)..(4): Phosphorothioate 3'-Internucleotide Linkage
  misc_feature (8)..(8): 2'-deoxy-2'-C-allyl
  misc_feature (29)..(29): n stands for inosine
  misc_feature (35)..(35): n stands for inverted deoxyabasic derivative
uccucccugaugaggccguuaggccgaanagcccn

SEQ ID NO: 9469 - RNA, 37 nt, Artificial Sequence
  Description of Artificial Sequence:  Enzymatic Nucleic acid
  misc_feature (1)..(8): 2'-O-Methyl
  misc_feature (12)..(12): 2'-O-Methyl
  misc_feature (14)..(26): 2'-O-Methyl
  misc_feature (28)..(29): 2'-O-Methyl
  misc_feature (31)..(36): 2'-O-Methyl
  misc_feature (1)..(4): Phosphorothioate 3'-Internucleotide Linkage
  misc_feature (9)..(9): 2'-deoxy-2'-C-allyl
  misc_feature (30)..(30): n stands for inosine
  misc_feature (37)..(37): n stands for inverted deoxyabasic derivative
agggcaacugaugaggccguuaggccgaanaggacan

SEQ ID NO: 9470 - RNA, 37 nt, Artificial Sequence
  Description of Artificial Sequence:  Enzymatic Nucleic acid
  misc_feature (1)..(8): 2'-O-Methyl
  misc_feature (12)..(12): 2'-O-Methyl
  misc_feature (14)..(26): 2'-O-Methyl
  misc_feature (28)..(29): 2'-O-Methyl
  misc_feature (31)..(36): 2'-O-Methyl
  misc_feature (1)..(4): Phosphorothioate 3'-Internucleotide Linkage
  misc_feature (9)..(9): 2'-deoxy-2'-C-allyl
  misc_feature (30)..(30): n stands for inosine
  misc_feature (37)..(37): n stands for inverted deoxyabasic derivative
uccacugcugaugaggccguuaggccgaanuugaggn

SEQ ID NO: 9471 - RNA, 37 nt, Artificial Sequence
  Description of Artificial Sequence:  Enzymatic Nucleic acid
  misc_feature (1)..(8): 2'-O-Methyl
  misc_feature (12)..(12): 2'-O-Methyl
  misc_feature (14)..(26): 2'-O-Methyl
  misc_feature (28)..(29): 2'-O-Methyl
  misc_feature (31)..(36): 2'-O-Methyl
  misc_feature (1)..(4): Phosphorothioate 3'-Internucleotide Linkage
  misc_feature (9)..(9): 2'-deoxy-2'-C-allyl
  misc_feature (30)..(30): n stands for inosine
  misc_feature (37)..(37): n stands for inverted deoxyabasic derivative
gcuccaccugaugaggccguuaggccgaanuguugan

SEQ ID NO: 9472 - RNA, 37 nt, Artificial Sequence
  Description of Artificial Sequence:  Enzymatic Nucleic acid
  misc_feature (1)..(8): 2'-O-Methyl
  misc_feature (12)..(12): 2'-O-Methyl
  misc_feature (14)..(26): 2'-O-Methyl
  misc_feature (28)..(29): 2'-O-Methyl
  misc_feature (31)..(36): 2'-O-Methyl
  misc_feature (1)..(4): Phosphorothioate 3'-Internucleotide Linkage
  misc_feature (9)..(9): 2'-deoxy-2'-C-allyl
  misc_feature (30)..(30): n stands for inosine
  misc_feature (37)..(37): n stands for inverted deoxyabasic derivative
ccucugacugaugaggccguuaggccgaanaucugcn

SEQ ID NO: 9473 - RNA, 37 nt, Artificial Sequence
  Description of Artificial Sequence:  Enzymatic Nucleic acid
  misc_feature (1)..(8): 2'-O-Methyl
  misc_feature (12)..(12): 2'-O-Methyl
  misc_feature (14)..(26): 2'-O-Methyl
  misc_feature (28)..(29): 2'-O-Methyl
  misc_feature (31)..(36): 2'-O-Methyl
  misc_feature (1)..(4): Phosphorothioate 3'-Internucleotide Linkage
  misc_feature (9)..(9): 2'-deoxy-2'-C-allyl
  misc_feature (30)..(30): n stands for inosine
  misc_feature (37)..(37): n stands for inverted deoxyabasic derivative
uuucucacugaugaggccguuaggccgaanggcagcn

SEQ ID NO: 9474 - RNA, 37 nt, Artificial Sequence
  Description of Artificial Sequence:  Enzymatic Nucleic acid
  misc_feature (1)..(8): 2'-O-Methyl
  misc_feature (12)..(12): 2'-O-Methyl
  misc_feature (14)..(26): 2'-O-Methyl
  misc_feature (28)..(29): 2'-O-Methyl
  misc_feature (31)..(36): 2'-O-Methyl
  misc_feature (1)..(4): Phosphorothioate 3'-Internucleotide Linkage
  misc_feature (9)..(9): 2'-deoxy-2'-C-allyl
  misc_feature (30)..(30): n stands for inosine
  misc_feature (37)..(37): n stands for inverted deoxyabasic derivative
ggguugucugaugaggccguuaggccgaancugaacn

SEQ ID NO: 9475 - RNA, 37 nt, Artificial Sequence
  Description of Artificial Sequence:  Enzymatic Nucleic acid
  misc_feature (1)..(8): 2'-O-Methyl
  misc_feature (12)..(12): 2'-O-Methyl
  misc_feature (14)..(26): 2'-O-Methyl
  misc_feature (28)..(29): 2'-O-Methyl
  misc_feature (31)..(36): 2'-O-Methyl
  misc_feature (1)..(4): Phosphorothioate 3'-Internucleotide Linkage
  misc_feature (9)..(9): 2'-deoxy-2'-C-allyl
  misc_feature (30)..(30): n stands for inosine
  misc_feature (37)..(37): n stands for inverted deoxyabasic derivative
ccccagccugaugaggccguuaggccgaancucccan

SEQ ID NO: 9476 - RNA, 37 nt, Artificial Sequence
  Description of Artificial Sequence:  Enzymatic Nucleic acid
  misc_feature (1)..(8): 2'-O-Methyl
  misc_feature (12)..(12): 2'-O-Methyl
  misc_feature (14)..(26): 2'-O-Methyl
  misc_feature (28)..(29): 2'-O-Methyl
  misc_feature (31)..(36): 2'-O-Methyl
  misc_feature (1)..(4): Phosphorothioate 3'-Internucleotide Linkage
  misc_feature (9)..(9): 2'-deoxy-2'-C-allyl
  misc_feature (30)..(30): n stands for inosine
  misc_feature (37)..(37): n stands for inverted deoxyabasic derivative
ccucucccugaugaggccguuaggccgaancaccccn

SEQ ID NO: 9477 - RNA, 37 nt, Artificial Sequence
  Description of Artificial Sequence:  Enzymatic Nucleic acid
  misc_feature (1)..(8): 2'-O-Methyl
  misc_feature (12)..(12): 2'-O-Methyl
  misc_feature (14)..(26): 2'-O-Methyl
  misc_feature (28)..(29): 2'-O-Methyl
  misc_feature (31)..(36): 2'-O-Methyl
  misc_feature (1)..(4): Phosphorothioate 3'-Internucleotide Linkage
  misc_feature (9)..(9): 2'-deoxy-2'-C-allyl
  misc_feature (30)..(30): n stands for inosine
  misc_feature (37)..(37): n stands for inverted deoxyabasic derivative
ggguugucugaugaggccguuaggccgaanagcaugn

SEQ ID NO: 9478 - RNA, 37 nt, Artificial Sequence
  Description of Artificial Sequence:  Enzymatic Nucleic acid
  misc_feature (1)..(8): 2'-O-Methyl
  misc_feature (12)..(12): 2'-O-Methyl
  misc_feature (14)..(26): 2'-O-Methyl
  misc_feature (28)..(29): 2'-O-Methyl
  misc_feature (31)..(36): 2'-O-Methyl
  misc_feature (1)..(4): Phosphorothioate 3'-Internucleotide Linkage
  misc_feature (9)..(9): 2'-deoxy-2'-C-allyl
  misc_feature (30)..(30): n stands for inosine
  misc_feature (37)..(37): n stands for inverted deoxyabasic derivative
agcuguccugaugaggccguuaggccgaanccccacn

SEQ ID NO: 9479 - RNA, 37 nt, Artificial Sequence
  Description of Artificial Sequence:  Enzymatic Nucleic acid
  misc_feature (1)..(8): 2'-O-Methyl
  misc_feature (12)..(12): 2'-O-Methyl
  misc_feature (14)..(26): 2'-O-Methyl
  misc_feature (28)..(29): 2'-O-Methyl
  misc_feature (31)..(36): 2'-O-Methyl
  misc_feature (1)..(4): Phosphorothioate 3'-Internucleotide Linkage
  misc_feature (9)..(9): 2'-deoxy-2'-C-allyl
  misc_feature (30)..(30): n stands for inosine
  misc_feature (37)..(37): n stands for inverted deoxyabasic derivative
ugauggacugaugaggccguuaggccgaanugcagun

SEQ ID NO: 9480 - RNA, 37 nt, Artificial Sequence
  Description of Artificial Sequence:  Enzymatic Nucleic acid
  misc_feature (1)..(8): 2'-O-Methyl
  misc_feature (12)..(12): 2'-O-Methyl
  misc_feature (14)..(26): 2'-O-Methyl
  misc_feature (28)..(29): 2'-O-Methyl
  misc_feature (31)..(36): 2'-O-Methyl
  misc_feature (1)..(4): Phosphorothioate 3'-Internucleotide Linkage
  misc_feature (9)..(9): 2'-deoxy-2'-C-allyl
  misc_feature (30)..(30): n stands for inosine
  misc_feature (37)..(37): n stands for inverted deoxyabasic derivative
ggcaggacugaugaggccguuaggccgaanuggagan

SEQ ID NO: 9481 - RNA, 37 nt, Artificial Sequence
  Description of Artificial Sequence:  Enzymatic Nucleic acid
  misc_feature (1)..(8): 2'-O-Methyl
  misc_feature (12)..(12): 2'-O-Methyl
  misc_feature (14)..(26): 2'-O-Methyl
  misc_feature (28)..(29): 2'-O-Methyl
  misc_feature (31)..(36): 2'-O-Methyl
  misc_feature (1)..(4): Phosphorothioate 3'-Internucleotide Linkage
  misc_feature (9)..(9): 2'-deoxy-2'-C-allyl
  misc_feature (30)..(30): n stands for inosine
  misc_feature (37)..(37): n stands for inverted deoxyabasic derivative
gauuucucugaugaggccguuaggccgaanguucucn

SEQ ID NO: 9482 - RNA, 37 nt, Artificial Sequence
  Description of Artificial Sequence:  Enzymatic Nucleic acid
  misc_feature (1)..(8): 2'-O-Methyl
  misc_feature (12)..(12): 2'-O-Methyl
  misc_feature (14)..(26): 2'-O-Methyl
  misc_feature (28)..(29): 2'-O-Methyl
  misc_feature (31)..(36): 2'-O-Methyl
  misc_feature (1)..(4): Phosphorothioate 3'-Internucleotide Linkage
  misc_feature (9)..(9): 2'-deoxy-2'-C-allyl
  misc_feature (30)..(30): n stands for inosine
  misc_feature (37)..(37): n stands for inverted deoxyabasic derivative
ugacgaccugaugaggccguuaggccgaancaagagn

SEQ ID NO: 9483 - RNA, 37 nt, Artificial Sequence
  Description of Artificial Sequence:  Enzymatic Nucleic acid
  misc_feature (1)..(8): 2'-O-Methyl
  misc_feature (12)..(12): 2'-O-Methyl
  misc_feature (14)..(26): 2'-O-Methyl
  misc_feature (28)..(29): 2'-O-Methyl
  misc_feature (31)..(36): 2'-O-Methyl
  misc_feature (1)..(4): Phosphorothioate 3'-Internucleotide Linkage
  misc_feature (9)..(9): 2'-deoxy-2'-C-allyl
  misc_feature (30)..(30): n stands for inosine
  misc_feature (37)..(37): n stands for inverted deoxyabasic derivative
uauguuccugaugaggccguuaggccgaangcugacn

SEQ ID NO: 9484 - RNA, 37 nt, Artificial Sequence
  Description of Artificial Sequence:  Enzymatic Nucleic acid
  misc_feature (1)..(8): 2'-O-Methyl
  misc_feature (12)..(12): 2'-O-Methyl
  misc_feature (14)..(26): 2'-O-Methyl
  misc_feature (28)..(29): 2'-O-Methyl
  misc_feature (31)..(36): 2'-O-Methyl
  misc_feature (1)..(4): Phosphorothioate 3'-Internucleotide Linkage
  misc_feature (9)..(9): 2'-deoxy-2'-C-allyl
  misc_feature (30)..(30): n stands for inosine
  misc_feature (37)..(37): n stands for inverted deoxyabasic derivative
ccccagccugaugaggccguuaggccgaancccucgn

SEQ ID NO: 9485 - RNA, 37 nt, Artificial Sequence
  Description of Artificial Sequence:  Enzymatic Nucleic acid
  misc_feature (1)..(8): 2'-O-Methyl
  misc_feature (12)..(12): 2'-O-Methyl
  misc_feature (14)..(26): 2'-O-Methyl
  misc_feature (28)..(29): 2'-O-Methyl
  misc_feature (31)..(36): 2'-O-Methyl
  misc_feature (1)..(4): Phosphorothioate 3'-Internucleotide Linkage
  misc_feature (9)..(9): 2'-deoxy-2'-C-allyl
  misc_feature (30)..(30): n stands for inosine
  misc_feature (37)..(37): n stands for inverted deoxyabasic derivative
acucccucugaugaggccguuaggccgaangcucacn

SEQ ID NO: 9486 - RNA, 37 nt, Artificial Sequence
  Description of Artificial Sequence:  Enzymatic Nucleic acid
  misc_feature (1)..(8): 2'-O-Methyl
  misc_feature (12)..(12): 2'-O-Methyl
  misc_feature (14)..(26): 2'-O-Methyl
  misc_feature (28)..(29): 2'-O-Methyl
  misc_feature (31)..(36): 2'-O-Methyl
  misc_feature (1)..(4): Phosphorothioate 3'-Internucleotide Linkage
  misc_feature (9)..(9): 2'-deoxy-2'-C-allyl
  misc_feature (30)..(30): n stands for inosine
  misc_feature (37)..(37): n stands for inverted deoxyabasic derivative
guugucucugaugaggccguuaggccgaanuccccgn

SEQ ID NO: 9487 - RNA, 35 nt, Artificial Sequence
  Description of Artificial Sequence:  Enzymatic Nucleic acid
  misc_feature (1)..(7): 2'-O-Methyl
  misc_feature (11)..(11): 2'-O-Methyl
  misc_feature (13)..(25): 2'-O-Methyl
  misc_feature (27)..(28): 2'-O-Methyl
  misc_feature (30)..(34): 2'-O-Methyl
  misc_feature (1)..(4): Phosphorothioate 3'-Internucleotide Linkage
  misc_feature (8)..(8): 2'-deoxy-2'-C-allyl
  misc_feature (29)..(29): n stands for inosine
  misc_feature (35)..(35): n stands for inverted deoxyabasic derivative
guuguccugaugaggccguuaggccgaangucccn

SEQ ID NO: 9488 - RNA, 37 nt, Artificial Sequence
  Description of Artificial Sequence:  Enzymatic Nucleic acid
  misc_feature (1)..(8): 2'-O-Methyl
  misc_feature (12)..(12): 2'-O-Methyl
  misc_feature (14)..(26): 2'-O-Methyl
  misc_feature (28)..(29): 2'-O-Methyl
  misc_feature (31)..(36): 2'-O-Methyl
  misc_feature (1)..(4): Phosphorothioate 3'-Internucleotide Linkage
  misc_feature (9)..(9): 2'-deoxy-2'-C-allyl
  misc_feature (30)..(30): n stands for inosine
  misc_feature (37)..(37): n stands for inverted deoxyabasic derivative
gcacacacugaugaggccguuaggccgaangccggcn

SEQ ID NO: 9489 - RNA, 37 nt, Artificial Sequence
  Description of Artificial Sequence:  Enzymatic Nucleic acid
  misc_feature (1)..(8): 2'-O-Methyl
  misc_feature (12)..(12): 2'-O-Methyl
  misc_feature (14)..(26): 2'-O-Methyl
  misc_feature (28)..(29): 2'-O-Methyl
  misc_feature (31)..(36): 2'-O-Methyl
  misc_feature (1)..(4): Phosphorothioate 3'-Internucleotide Linkage
  misc_feature (9)..(9): 2'-deoxy-2'-C-allyl
  misc_feature (30)..(30): n stands for inosine
  misc_feature (37)..(37): n stands for inverted deoxyabasic derivative
cgguggacugaugaggccguuaggccgaanugaggcn

SEQ ID NO: 9490 - RNA, 37 nt, Artificial Sequence
  Description of Artificial Sequence:  Enzymatic Nucleic acid
  misc_feature (1)..(8): 2'-O-Methyl
  misc_feature (12)..(12): 2'-O-Methyl
  misc_feature (14)..(26): 2'-O-Methyl
  misc_feature (28)..(29): 2'-O-Methyl
  misc_feature (31)..(36): 2'-O-Methyl
  misc_feature (1)..(4): Phosphorothioate 3'-Internucleotide Linkage
  misc_feature (9)..(9): 2'-deoxy-2'-C-allyl
  misc_feature (30)..(30): n stands for inosine
  misc_feature (37)..(37): n stands for inverted deoxyabasic derivative
guugcaccugaugaggccguuaggccgaanuggaggn

SEQ ID NO: 9491 - RNA, 37 nt, Artificial Sequence
  Description of Artificial Sequence:  Enzymatic Nucleic acid
  misc_feature (1)..(8): 2'-O-Methyl
  misc_feature (12)..(12): 2'-O-Methyl
  misc_feature (14)..(26): 2'-O-Methyl
  misc_feature (28)..(29): 2'-O-Methyl
  misc_feature (31)..(36): 2'-O-Methyl
  misc_feature (1)..(4): Phosphorothioate 3'-Internucleotide Linkage
  misc_feature (9)..(9): 2'-deoxy-2'-C-allyl
  misc_feature (30)..(30): n stands for inosine
  misc_feature (37)..(37): n stands for inverted deoxyabasic derivative
gaugagucugaugaggccguuaggccgaancacggun

SEQ ID NO: 9492 - RNA, 37 nt, Artificial Sequence
  Description of Artificial Sequence:  Enzymatic Nucleic acid
  misc_feature (1)..(8): 2'-O-Methyl
  misc_feature (12)..(12): 2'-O-Methyl
  misc_feature (14)..(26): 2'-O-Methyl
  misc_feature (28)..(29): 2'-O-Methyl
  misc_feature (31)..(36): 2'-O-Methyl
  misc_feature (1)..(4): Phosphorothioate 3'-Internucleotide Linkage
  misc_feature (9)..(9): 2'-deoxy-2'-C-allyl
  misc_feature (30)..(30): n stands for inosine
  misc_feature (37)..(37): n stands for inverted deoxyabasic derivative
uccuccacugaugaggccguuaggccgaanuaguucn

SEQ ID NO: 9493 - RNA, 37 nt, Artificial Sequence
  Description of Artificial Sequence:  Enzymatic Nucleic acid
  misc_feature (1)..(8): 2'-O-Methyl
  misc_feature (12)..(12): 2'-O-Methyl
  misc_feature (14)..(26): 2'-O-Methyl
  misc_feature (28)..(29): 2'-O-Methyl
  misc_feature (31)..(36): 2'-O-Methyl
  misc_feature (1)..(4): Phosphorothioate 3'-Internucleotide Linkage
  misc_feature (9)..(9): 2'-deoxy-2'-C-allyl
  misc_feature (30)..(30): n stands for inosine
  misc_feature (37)..(37): n stands for inverted deoxyabasic derivative
aagcgaccugaugaggccguuaggccgaanuccuccn

SEQ ID NO: 9494 - RNA, 37 nt, Artificial Sequence
  Description of Artificial Sequence:  Enzymatic Nucleic acid
  misc_feature (1)..(8): 2'-O-Methyl
  misc_feature (12)..(12): 2'-O-Methyl
  misc_feature (14)..(26): 2'-O-Methyl
  misc_feature (28)..(29): 2'-O-Methyl
  misc_feature (31)..(36): 2'-O-Methyl
  misc_feature (1)..(4): Phosphorothioate 3'-Internucleotide Linkage
  misc_feature (9)..(9): 2'-deoxy-2'-C-allyl
  misc_feature (30)..(30): n stands for inosine
  misc_feature (37)..(37): n stands for inverted deoxyabasic derivative
cuggcagcugaugaggccguuaggccgaanauuccgn

SEQ ID NO: 9495 - RNA, 37 nt, Artificial Sequence
  Description of Artificial Sequence:  Enzymatic Nucleic acid
  misc_feature (1)..(8): 2'-O-Methyl
  misc_feature (12)..(12): 2'-O-Methyl
  misc_feature (14)..(26): 2'-O-Methyl
  misc_feature (28)..(29): 2'-O-Methyl
  misc_feature (31)..(36): 2'-O-Methyl
  misc_feature (1)..(4): Phosphorothioate 3'-Internucleotide Linkage
  misc_feature (9)..(9): 2'-deoxy-2'-C-allyl
  misc_feature (30)..(30): n stands for inosine
  misc_feature (37)..(37): n stands for inverted deoxyabasic derivative
agcgcugcugaugaggccguuaggccgaanggucucn

SEQ ID NO: 9496 - RNA, 37 nt, Artificial Sequence
  Description of Artificial Sequence:  Enzymatic Nucleic acid
  misc_feature (1)..(8): 2'-O-Methyl
  misc_feature (12)..(12): 2'-O-Methyl
  misc_feature (14)..(26): 2'-O-Methyl
  misc_feature (28)..(29): 2'-O-Methyl
  misc_feature (31)..(36): 2'-O-Methyl
  misc_feature (1)..(4): Phosphorothioate 3'-Internucleotide Linkage
  misc_feature (9)..(9): 2'-deoxy-2'-C-allyl
  misc_feature (30)..(30): n stands for inosine
  misc_feature (37)..(37): n stands for inverted deoxyabasic derivative
augacaacugaugaggccguuaggccgaanuagcgcn

SEQ ID NO: 9497 - RNA, 37 nt, Artificial Sequence
  Description of Artificial Sequence:  Enzymatic Nucleic acid
  misc_feature (1)..(8): 2'-O-Methyl
  misc_feature (12)..(12): 2'-O-Methyl
  misc_feature (14)..(26): 2'-O-Methyl
  misc_feature (28)..(29): 2'-O-Methyl
  misc_feature (31)..(36): 2'-O-Methyl
  misc_feature (1)..(4): Phosphorothioate 3'-Internucleotide Linkage
  misc_feature (9)..(9): 2'-deoxy-2'-C-allyl
  misc_feature (30)..(30): n stands for inosine
  misc_feature (37)..(37): n stands for inverted deoxyabasic derivative
aaugacacugaugaggccguuaggccgaanguagcgn

SEQ ID NO: 9498 - RNA, 37 nt, Artificial Sequence
  Description of Artificial Sequence:  Enzymatic Nucleic acid
  misc_feature (1)..(8): 2'-O-Methyl
  misc_feature (12)..(12): 2'-O-Methyl
  misc_feature (14)..(26): 2'-O-Methyl
  misc_feature (28)..(29): 2'-O-Methyl
  misc_feature (31)..(36): 2'-O-Methyl
  misc_feature (1)..(4): Phosphorothioate 3'-Internucleotide Linkage
  misc_feature (9)..(9): 2'-deoxy-2'-C-allyl
  misc_feature (30)..(30): n stands for inosine
  misc_feature (37)..(37): n stands for inverted deoxyabasic derivative
auccauccugaugaggccguuaggccgaanggcacgn

SEQ ID NO: 9499 - RNA, 37 nt, Artificial Sequence
  Description of Artificial Sequence:  Enzymatic Nucleic acid
  misc_feature (1)..(8): 2'-O-Methyl
  misc_feature (12)..(12): 2'-O-Methyl
  misc_feature (14)..(26): 2'-O-Methyl
  misc_feature (28)..(29): 2'-O-Methyl
  misc_feature (31)..(36): 2'-O-Methyl
  misc_feature (1)..(4): Phosphorothioate 3'-Internucleotide Linkage
  misc_feature (9)..(9): 2'-deoxy-2'-C-allyl
  misc_feature (30)..(30): n stands for inosine
  misc_feature (37)..(37): n stands for inverted deoxyabasic derivative
ugugggacugaugaggccguuaggccgaanagguacn

SEQ ID NO: 9500 - RNA, 37 nt, Artificial Sequence
  Description of Artificial Sequence:  Enzymatic Nucleic acid
  misc_feature (1)..(8): 2'-O-Methyl
  misc_feature (12)..(12): 2'-O-Methyl
  misc_feature (14)..(26): 2'-O-Methyl
  misc_feature (28)..(29): 2'-O-Methyl
  misc_feature (31)..(36): 2'-O-Methyl
  misc_feature (1)..(4): Phosphorothioate 3'-Internucleotide Linkage
  misc_feature (9)..(9): 2'-deoxy-2'-C-allyl
  misc_feature (30)..(30): n stands for inosine
  misc_feature (37)..(37): n stands for inverted deoxyabasic derivative
cucaggacugaugaggccguuaggccgaanggagucn

SEQ ID NO: 9501 - RNA, 37 nt, Artificial Sequence
  Description of Artificial Sequence:  Enzymatic Nucleic acid
  misc_feature (1)..(8): 2'-O-Methyl
  misc_feature (12)..(12): 2'-O-Methyl
  misc_feature (14)..(26): 2'-O-Methyl
  misc_feature (28)..(29): 2'-O-Methyl
  misc_feature (31)..(36): 2'-O-Methyl
  misc_feature (1)..(4): Phosphorothioate 3'-Internucleotide Linkage
  misc_feature (9)..(9): 2'-deoxy-2'-C-allyl
  misc_feature (30)..(30): n stands for inosine
  misc_feature (37)..(37): n stands for inverted deoxyabasic derivative
acugggacugaugaggccguuaggccgaanaaggugn

SEQ ID NO: 9502 - RNA, 37 nt, Artificial Sequence
  Description of Artificial Sequence:  Enzymatic Nucleic acid
  misc_feature (1)..(8): 2'-O-Methyl
  misc_feature (12)..(12): 2'-O-Methyl
  misc_feature (14)..(26): 2'-O-Methyl
  misc_feature (28)..(29): 2'-O-Methyl
  misc_feature (31)..(36): 2'-O-Methyl
  misc_feature (1)..(4): Phosphorothioate 3'-Internucleotide Linkage
  misc_feature (9)..(9): 2'-deoxy-2'-C-allyl
  misc_feature (30)..(30): n stands for inosine
  misc_feature (37)..(37): n stands for inverted deoxyabasic derivative
cacugggcugaugaggccguuaggccgaangaaggun

SEQ ID NO: 9503 - RNA, 35 nt, Artificial Sequence
  Description of Artificial Sequence:  Enzymatic Nucleic acid
  misc_feature (1)..(7): 2'-O-Methyl
  misc_feature (11)..(11): 2'-O-Methyl
  misc_feature (13)..(25): 2'-O-Methyl
  misc_feature (27)..(28): 2'-O-Methyl
  misc_feature (30)..(34): 2'-O-Methyl
  misc_feature (1)..(4): Phosphorothioate 3'-Internucleotide Linkage
  misc_feature (8)..(8): 2'-deoxy-2'-C-allyl
  misc_feature (29)..(29): n stands for inosine
  misc_feature (35)..(35): n stands for inverted deoxyabasic derivative
gggaaccugaugaggccguuaggccgaanacuggn

SEQ ID NO: 9504 - RNA, 37 nt, Artificial Sequence
  Description of Artificial Sequence:  Enzymatic Nucleic acid
  misc_feature (1)..(8): 2'-O-Methyl
  misc_feature (12)..(12): 2'-O-Methyl
  misc_feature (14)..(26): 2'-O-Methyl
  misc_feature (28)..(29): 2'-O-Methyl
  misc_feature (31)..(36): 2'-O-Methyl
  misc_feature (1)..(4): Phosphorothioate 3'-Internucleotide Linkage
  misc_feature (9)..(9): 2'-deoxy-2'-C-allyl
  misc_feature (30)..(30): n stands for inosine
  misc_feature (37)..(37): n stands for inverted deoxyabasic derivative
gggcgcgcugaugaggccguuaggccgaanguucagn

SEQ ID NO: 9505 - RNA, 37 nt, Artificial Sequence
  Description of Artificial Sequence:  Enzymatic Nucleic acid
  misc_feature (1)..(8): 2'-O-Methyl
  misc_feature (12)..(12): 2'-O-Methyl
  misc_feature (14)..(26): 2'-O-Methyl
  misc_feature (28)..(29): 2'-O-Methyl
  misc_feature (31)..(36): 2'-O-Methyl
  misc_feature (1)..(4): Phosphorothioate 3'-Internucleotide Linkage
  misc_feature (9)..(9): 2'-deoxy-2'-C-allyl
  misc_feature (30)..(30): n stands for inosine
  misc_feature (37)..(37): n stands for inverted deoxyabasic derivative
guagugucugaugaggccguuaggccgaangucucun

SEQ ID NO: 9506 - RNA, 37 nt, Artificial Sequence
  Description of Artificial Sequence:  Enzymatic Nucleic acid
  misc_feature (1)..(8): 2'-O-Methyl
  misc_feature (12)..(12): 2'-O-Methyl
  misc_feature (14)..(26): 2'-O-Methyl
  misc_feature (28)..(29): 2'-O-Methyl
  misc_feature (31)..(36): 2'-O-Methyl
  misc_feature (1)..(4): Phosphorothioate 3'-Internucleotide Linkage
  misc_feature (9)..(9): 2'-deoxy-2'-C-allyl
  misc_feature (30)..(30): n stands for inosine
  misc_feature (37)..(37): n stands for inverted deoxyabasic derivative
gguagugcugaugaggccguuaggccgaanggucucn

SEQ ID NO: 9507 - RNA, 35 nt, Artificial Sequence
  Description of Artificial Sequence:  Enzymatic Nucleic acid
  misc_feature (1)..(8): 2'-O-Methyl
  misc_feature (12)..(12): 2'-O-Methyl
  misc_feature (14)..(26): 2'-O-Methyl
  misc_feature (28)..(29): 2'-O-Methyl
  misc_feature (31)..(36): 2'-O-Methyl
  misc_feature (1)..(4): Phosphorothioate 3'-Internucleotide Linkage
  misc_feature (9)..(9): 2'-deoxy-2'-C-allyl
  misc_feature (30)..(30): n stands for inosine
  misc_feature (37)..(37): n stands for inverted deoxyabasic derivative
ugguagcugaugaggccguuaggccgaanugggun

SEQ ID NO: 9508 - RNA, 37 nt, Artificial Sequence
  Description of Artificial Sequence:  Enzymatic Nucleic acid
  misc_feature (1)..(8): 2'-O-Methyl
  misc_feature (12)..(12): 2'-O-Methyl
  misc_feature (14)..(26): 2'-O-Methyl
  misc_feature (28)..(29): 2'-O-Methyl
  misc_feature (31)..(36): 2'-O-Methyl
  misc_feature (1)..(4): Phosphorothioate 3'-Internucleotide Linkage
  misc_feature (9)..(9): 2'-deoxy-2'-C-allyl
  misc_feature (30)..(30): n stands for inosine
  misc_feature (37)..(37): n stands for inverted deoxyabasic derivative
ggguccucugaugaggccguuaggccgaanuagugun

SEQ ID NO: 9509 - RNA, 37 nt, Artificial Sequence
  Description of Artificial Sequence:  Enzymatic Nucleic acid
  misc_feature (1)..(8): 2'-O-Methyl
  misc_feature (12)..(12): 2'-O-Methyl
  misc_feature (14)..(26): 2'-O-Methyl
  misc_feature (28)..(29): 2'-O-Methyl
  misc_feature (31)..(36): 2'-O-Methyl
  misc_feature (1)..(4): Phosphorothioate 3'-Internucleotide Linkage
  misc_feature (9)..(9): 2'-deoxy-2'-C-allyl
  misc_feature (30)..(30): n stands for inosine
  misc_feature (37)..(37): n stands for inverted deoxyabasic derivative
ugcugugcugaugaggccguuaggccgaangguccun

SEQ ID NO: 9510 - RNA, 36 nt, Artificial Sequence
  Description of Artificial Sequence:  Enzymatic Nucleic acid
  misc_feature (1)..(16): 2'-O-Methyl
  misc_feature (18)..(23): 2'-O-Methyl
  misc_feature (25)..(26): 2'-O-Methyl
  misc_feature (28)..(35): 2'-O-Methyl
  misc_feature (1)..(4): Phosphorothioate 3'-Internucleotide Linkage
  misc_feature (17)..(17): 2'-deoxy-2'-Amino
  misc_feature (27)..(27): 2'-deoxy-2'-Amino
  misc_feature (36)..(36): n stands for inverted deoxyabasic derivative
agggucggccgaaaggcgagugaggucuaucgcugn

SEQ ID NO: 9511 - RNA, 34 nt, Artificial Sequence
  Description of Artificial Sequence:  Enzymatic Nucleic acid
  misc_feature (1)..(15): 2'-O-Methyl
  misc_feature (17)..(22): 2'-O-Methyl
  misc_feature (24)..(25): 2'-O-Methyl
  misc_feature (27)..(33): 2'-O-Methyl
  misc_feature (1)..(4): Phosphorothioate 3'-Internucleotide Linkage
  misc_feature (16)..(16): 2'-deoxy-2'-Amino
  misc_feature (26)..(26): 2'-deoxy-2'-Amino
  misc_feature (34)..(34): n stands for inverted deoxyabasic derivative
acaucagccgaaaggcgagugaggucuucuggun

SEQ ID NO: 9512 - RNA, 34 nt, Artificial Sequence
  Description of Artificial Sequence:  Enzymatic Nucleic acid
  misc_feature (1)..(15): 2'-O-Methyl
  misc_feature (17)..(22): 2'-O-Methyl
  misc_feature (24)..(25): 2'-O-Methyl
  misc_feature (27)..(33): 2'-O-Methyl
  misc_feature (1)..(4): Phosphorothioate 3'-Internucleotide Linkage
  misc_feature (16)..(16): 2'-deoxy-2'-Amino
  misc_feature (26)..(26): 2'-deoxy-2'-Amino
  misc_feature (34)..(34): n stands for inverted deoxyabasic derivative
aagaaggccgaaaggcgagugaggucuccugcun

SEQ ID NO: 9513 - RNA, 36 nt, Artificial Sequence
  Description of Artificial Sequence:  Enzymatic Nucleic acid
  misc_feature (1)..(16): 2'-O-Methyl
  misc_feature (18)..(23): 2'-O-Methyl
  misc_feature (25)..(26): 2'-O-Methyl
  misc_feature (28)..(35): 2'-O-Methyl
  misc_feature (1)..(4): Phosphorothioate 3'-Internucleotide Linkage
  misc_feature (17)..(17): 2'-deoxy-2'-Amino
  misc_feature (27)..(27): 2'-deoxy-2'-Amino
  misc_feature (36)..(36): n stands for inverted deoxyabasic derivative
gaagaaggccgaaaggcgagugaggucuccugcugn

SEQ ID NO: 9514 - RNA, 34 nt, Artificial Sequence
  Description of Artificial Sequence:  Enzymatic Nucleic acid
  misc_feature (1)..(15): 2'-O-Methyl
  misc_feature (17)..(22): 2'-O-Methyl
  misc_feature (24)..(25): 2'-O-Methyl
  misc_feature (27)..(33): 2'-O-Methyl
  misc_feature (1)..(4): Phosphorothioate 3'-Internucleotide Linkage
  misc_feature (16)..(16): 2'-deoxy-2'-Amino
  misc_feature (26)..(26): 2'-deoxy-2'-Amino
  misc_feature (34)..(34): n stands for inverted deoxyabasic derivative
ggcuaggccgaaaggcgagugaggucuucgggan

SEQ ID NO: 9515 - RNA, 34 nt, Artificial Sequence
  Description of Artificial Sequence:  Enzymatic Nucleic acid
  misc_feature (1)..(15): 2'-O-Methyl
  misc_feature (17)..(22): 2'-O-Methyl
  misc_feature (24)..(25): 2'-O-Methyl
  misc_feature (27)..(33): 2'-O-Methyl
  misc_feature (1)..(4): Phosphorothioate 3'-Internucleotide Linkage
  misc_feature (16)..(16): 2'-deoxy-2'-Amino
  misc_feature (26)..(26): 2'-deoxy-2'-Amino
  misc_feature (34)..(34): n stands for inverted deoxyabasic derivative
uggcgggccgaaaggcgagugaggucugaggcgn

SEQ ID NO: 9516 - RNA, 36 nt, Artificial Sequence
  Description of Artificial Sequence:  Enzymatic Nucleic acid
  misc_feature (1)..(16): 2'-O-Methyl
  misc_feature (18)..(23): 2'-O-Methyl
  misc_feature (25)..(26): 2'-O-Methyl
  misc_feature (28)..(35): 2'-O-Methyl
  misc_feature (1)..(4): Phosphorothioate 3'-Internucleotide Linkage
  misc_feature (17)..(17): 2'-deoxy-2'-Amino
  misc_feature (27)..(27): 2'-deoxy-2'-Amino
  misc_feature (36)..(36): n stands for inverted deoxyabasic derivative
uuggcgggccgaaaggcgagugaggucugaggcggn

SEQ ID NO: 9517 - RNA, 36 nt, Artificial Sequence
  Description of Artificial Sequence:  Enzymatic Nucleic acid
  misc_feature (1)..(16): 2'-O-Methyl
  misc_feature (18)..(23): 2'-O-Methyl
  misc_feature (25)..(26): 2'-O-Methyl
  misc_feature (28)..(35): 2'-O-Methyl
  misc_feature (1)..(4): Phosphorothioate 3'-Internucleotide Linkage
  misc_feature (17)..(17): 2'-deoxy-2'-Amino
  misc_feature (27)..(27): 2'-deoxy-2'-Amino
  misc_feature (36)..(36): n stands for inverted deoxyabasic derivative
gcguugggccgaaaggcgagugaggucuggcgaggn

SEQ ID NO: 9518 - RNA, 34 nt, Artificial Sequence
  Description of Artificial Sequence:  Enzymatic Nucleic acid
  misc_feature (1)..(15): 2'-O-Methyl
  misc_feature (17)..(22): 2'-O-Methyl
  misc_feature (24)..(25): 2'-O-Methyl
  misc_feature (27)..(33): 2'-O-Methyl
  misc_feature (1)..(4): Phosphorothioate 3'-Internucleotide Linkage
  misc_feature (16)..(16): 2'-deoxy-2'-Amino
  misc_feature (26)..(26): 2'-deoxy-2'-Amino
  misc_feature (34)..(34): n stands for inverted deoxyabasic derivative
acuggagccgaaaggcgagugaggucuggagucn

SEQ ID NO: 9519 - RNA, 36 nt, Artificial Sequence
  Description of Artificial Sequence:  Enzymatic Nucleic acid
  misc_feature (1)..(16): 2'-O-Methyl
  misc_feature (18)..(23): 2'-O-Methyl
  misc_feature (25)..(26): 2'-O-Methyl
  misc_feature (28)..(35): 2'-O-Methyl
  misc_feature (1)..(4): Phosphorothioate 3'-Internucleotide Linkage
  misc_feature (17)..(17): 2'-deoxy-2'-Amino
  misc_feature (27)..(27): 2'-deoxy-2'-Amino
  misc_feature (36)..(36): n stands for inverted deoxyabasic derivative
uacuggagccgaaaggcgagugaggucuggagucan

SEQ ID NO: 9520 - RNA, 36 nt, Artificial Sequence
  Description of Artificial Sequence:  Enzymatic Nucleic acid
  misc_feature (1)..(16): 2'-O-Methyl
  misc_feature (18)..(23): 2'-O-Methyl
  misc_feature (25)..(26): 2'-O-Methyl
  misc_feature (28)..(35): 2'-O-Methyl
  misc_feature (1)..(4): Phosphorothioate 3'-Internucleotide Linkage
  misc_feature (17)..(17): 2'-deoxy-2'-Amino
  misc_feature (27)..(27): 2'-deoxy-2'-Amino
  misc_feature (36)..(36): n stands for inverted deoxyabasic derivative
cgcuccagccgaaaggcgagugaggucuuguguugn

SEQ ID NO: 9521 - RNA, 34 nt, Artificial Sequence
  Description of Artificial Sequence:  Enzymatic Nucleic acid
  misc_feature (1)..(15): 2'-O-Methyl
  misc_feature (17)..(22): 2'-O-Methyl
  misc_feature (24)..(25): 2'-O-Methyl
  misc_feature (27)..(33): 2'-O-Methyl
  misc_feature (1)..(4): Phosphorothioate 3'-Internucleotide Linkage
  misc_feature (16)..(16): 2'-deoxy-2'-Amino
  misc_feature (26)..(26): 2'-deoxy-2'-Amino
  misc_feature (34)..(34): n stands for inverted deoxyabasic derivative
gggcaggccgaaaggcgagugaggucuuccuucn

SEQ ID NO: 9522 - RNA, 36 nt, Artificial Sequence
  Description of Artificial Sequence:  Enzymatic Nucleic acid
  misc_feature (1)..(16): 2'-O-Methyl
  misc_feature (18)..(23): 2'-O-Methyl
  misc_feature (25)..(26): 2'-O-Methyl
  misc_feature (28)..(35): 2'-O-Methyl
  misc_feature (1)..(4): Phosphorothioate 3'-Internucleotide Linkage
  misc_feature (17)..(17): 2'-deoxy-2'-Amino
  misc_feature (27)..(27): 2'-deoxy-2'-Amino
  misc_feature (36)..(36): n stands for inverted deoxyabasic derivative
ugggcaggccgaaaggcgagugaggucuuccuucan

SEQ ID NO: 9523 - RNA, 36 nt, Artificial Sequence
  Description of Artificial Sequence:  Enzymatic Nucleic acid
  misc_feature (1)..(16): 2'-O-Methyl
  misc_feature (18)..(23): 2'-O-Methyl
  misc_feature (25)..(26): 2'-O-Methyl
  misc_feature (28)..(35): 2'-O-Methyl
  misc_feature (1)..(4): Phosphorothioate 3'-Internucleotide Linkage
  misc_feature (17)..(17): 2'-deoxy-2'-Amino
  misc_feature (27)..(27): 2'-deoxy-2'-Amino
  misc_feature (36)..(36): n stands for inverted deoxyabasic derivative
ccaucgagccgaaaggcgagugaggucuauguugcn

SEQ ID NO: 9524 - RNA, 36 nt, Artificial Sequence
  Description of Artificial Sequence:  Enzymatic Nucleic acid
  misc_feature (1)..(16): 2'-O-Methyl
  misc_feature (18)..(23): 2'-O-Methyl
  misc_feature (25)..(26): 2'-O-Methyl
  misc_feature (28)..(35): 2'-O-Methyl
  misc_feature (1)..(4): Phosphorothioate 3'-Internucleotide Linkage
  misc_feature (17)..(17): 2'-deoxy-2'-Amino
  misc_feature (27)..(27): 2'-deoxy-2'-Amino
  misc_feature (36)..(36): n stands for inverted deoxyabasic derivative
accccaggccgaaaggcgagugaggucuagcucccn

SEQ ID NO: 9525 - RNA, 36 nt, Artificial Sequence
  Description of Artificial Sequence:  Enzymatic Nucleic acid
  misc_feature (1)..(16): 2'-O-Methyl
  misc_feature (18)..(23): 2'-O-Methyl
  misc_feature (25)..(26): 2'-O-Methyl
  misc_feature (28)..(35): 2'-O-Methyl
  misc_feature (1)..(4): Phosphorothioate 3'-Internucleotide Linkage
  misc_feature (17)..(17): 2'-deoxy-2'-Amino
  misc_feature (27)..(27): 2'-deoxy-2'-Amino
  misc_feature (36)..(36): n stands for inverted deoxyabasic derivative
gcagucggccgaaaggcgagugaggucuucucccgn

SEQ ID NO: 9526 - RNA, 36 nt, Artificial Sequence
  Description of Artificial Sequence:  Enzymatic Nucleic acid
  misc_feature (1)..(16): 2'-O-Methyl
  misc_feature (18)..(23): 2'-O-Methyl
  misc_feature (25)..(26): 2'-O-Methyl
  misc_feature (28)..(35): 2'-O-Methyl
  misc_feature (1)..(4): Phosphorothioate 3'-Internucleotide Linkage
  misc_feature (17)..(17): 2'-deoxy-2'-Amino
  misc_feature (27)..(27): 2'-deoxy-2'-Amino
  misc_feature (36)..(36): n stands for inverted deoxyabasic derivative
uguagaggccgaaaggcgagugaggucuaugagugn

SEQ ID NO: 9527 - RNA, 36 nt, Artificial Sequence
  Description of Artificial Sequence:  Enzymatic Nucleic acid
  misc_feature (1)..(16): 2'-O-Methyl
  misc_feature (18)..(23): 2'-O-Methyl
  misc_feature (25)..(26): 2'-O-Methyl
  misc_feature (28)..(35): 2'-O-Methyl
  misc_feature (1)..(4): Phosphorothioate 3'-Internucleotide Linkage
  misc_feature (17)..(17): 2'-deoxy-2'-Amino
  misc_feature (27)..(27): 2'-deoxy-2'-Amino
  misc_feature (36)..(36): n stands for inverted deoxyabasic derivative
ucugguagccgaaaggcgagugaggucugugguggn

SEQ ID NO: 9528 - RNA, 36 nt, Artificial Sequence
  Description of Artificial Sequence:  Enzymatic Nucleic acid
  misc_feature (1)..(16): 2'-O-Methyl
  misc_feature (18)..(23): 2'-O-Methyl
  misc_feature (25)..(26): 2'-O-Methyl
  misc_feature (28)..(35): 2'-O-Methyl
  misc_feature (1)..(4): Phosphorothioate 3'-Internucleotide Linkage
  misc_feature (17)..(17): 2'-deoxy-2'-Amino
  misc_feature (27)..(27): 2'-deoxy-2'-Amino
  misc_feature (36)..(36): n stands for inverted deoxyabasic derivative
acgacuggccgaaaggcgagugaggucuaagagaan

SEQ ID NO: 9529 - RNA, 36 nt, Artificial Sequence
  Description of Artificial Sequence:  Enzymatic Nucleic acid
  misc_feature (1)..(16): 2'-O-Methyl
  misc_feature (18)..(23): 2'-O-Methyl
  misc_feature (25)..(26): 2'-O-Methyl
  misc_feature (28)..(35): 2'-O-Methyl
  misc_feature (1)..(4): Phosphorothioate 3'-Internucleotide Linkage
  misc_feature (17)..(17): 2'-deoxy-2'-Amino
  misc_feature (27)..(27): 2'-deoxy-2'-Amino
  misc_feature (36)..(36): n stands for inverted deoxyabasic derivative
cugacgagccgaaaggcgagugaggucuugcaagan

SEQ ID NO: 9530 - RNA, 34 nt, Artificial Sequence
  Description of Artificial Sequence:  Enzymatic Nucleic acid
  misc_feature (1)..(15): 2'-O-Methyl
  misc_feature (17)..(22): 2'-O-Methyl
  misc_feature (24)..(25): 2'-O-Methyl
  misc_feature (27)..(33): 2'-O-Methyl
  misc_feature (1)..(4): Phosphorothioate 3'-Internucleotide Linkage
  misc_feature (16)..(16): 2'-deoxy-2'-Amino
  misc_feature (26)..(26): 2'-deoxy-2'-Amino
  misc_feature (34)..(34): n stands for inverted deoxyabasic derivative
ggcugagccgaaaggcgagugaggucugacugcn

SEQ ID NO: 9531 - RNA, 36 nt, Artificial Sequence
  Description of Artificial Sequence:  Enzymatic Nucleic acid
  misc_feature (1)..(16): 2'-O-Methyl
  misc_feature (18)..(23): 2'-O-Methyl
  misc_feature (25)..(26): 2'-O-Methyl
  misc_feature (28)..(35): 2'-O-Methyl
  misc_feature (1)..(4): Phosphorothioate 3'-Internucleotide Linkage
  misc_feature (17)..(17): 2'-deoxy-2'-Amino
  misc_feature (27)..(27): 2'-deoxy-2'-Amino
  misc_feature (36)..(36): n stands for inverted deoxyabasic derivative
aggcugagccgaaaggcgagugaggucugacugcan

SEQ ID NO: 9532 - RNA, 36 nt, Artificial Sequence
  Description of Artificial Sequence:  Enzymatic Nucleic acid
  misc_feature (1)..(16): 2'-O-Methyl
  misc_feature (18)..(23): 2'-O-Methyl
  misc_feature (25)..(26): 2'-O-Methyl
  misc_feature (28)..(35): 2'-O-Methyl
  misc_feature (1)..(4): Phosphorothioate 3'-Internucleotide Linkage
  misc_feature (17)..(17): 2'-deoxy-2'-Amino
  misc_feature (27)..(27): 2'-deoxy-2'-Amino
  misc_feature (36)..(36): n stands for inverted deoxyabasic derivative
uuucugagccgaaaggcgagugaggucucggaggun

SEQ ID NO: 9533 - RNA, 34 nt, Artificial Sequence
  Description of Artificial Sequence:  Enzymatic Nucleic acid
  misc_feature (1)..(15): 2'-O-Methyl
  misc_feature (17)..(22): 2'-O-Methyl
  misc_feature (24)..(25): 2'-O-Methyl
  misc_feature (27)..(33): 2'-O-Methyl
  misc_feature (1)..(4): Phosphorothioate 3'-Internucleotide Linkage
  misc_feature (16)..(16): 2'-deoxy-2'-Amino
  misc_feature (26)..(26): 2'-deoxy-2'-Amino
  misc_feature (34)..(34): n stands for inverted deoxyabasic derivative
ggcucagccgaaaggcgagugaggucuccuccan

SEQ ID NO: 9534 - RNA, 36 nt, Artificial Sequence
  Description of Artificial Sequence:  Enzymatic Nucleic acid
  misc_feature (1)..(16): 2'-O-Methyl
  misc_feature (18)..(23): 2'-O-Methyl
  misc_feature (25)..(26): 2'-O-Methyl
  misc_feature (28)..(35): 2'-O-Methyl
  misc_feature (1)..(4): Phosphorothioate 3'-Internucleotide Linkage
  misc_feature (17)..(17): 2'-deoxy-2'-Amino
  misc_feature (27)..(27): 2'-deoxy-2'-Amino
  misc_feature (36)..(36): n stands for inverted deoxyabasic derivative
gggcacagccgaaaggcgagugaggucuuggauacn

SEQ ID NO: 9535 - RNA, 36 nt, Artificial Sequence
  Description of Artificial Sequence:  Enzymatic Nucleic acid
  misc_feature (1)..(16): 2'-O-Methyl
  misc_feature (18)..(23): 2'-O-Methyl
  misc_feature (25)..(26): 2'-O-Methyl
  misc_feature (28)..(35): 2'-O-Methyl
  misc_feature (1)..(4): Phosphorothioate 3'-Internucleotide Linkage
  misc_feature (17)..(17): 2'-deoxy-2'-Amino
  misc_feature (27)..(27): 2'-deoxy-2'-Amino
  misc_feature (36)..(36): n stands for inverted deoxyabasic derivative
gugggcagccgaaaggcgagugaggucuacuggaun

SEQ ID NO: 9536 - RNA, 36 nt, Artificial Sequence
  Description of Artificial Sequence:  Enzymatic Nucleic acid
  misc_feature (1)..(16): 2'-O-Methyl
  misc_feature (18)..(23): 2'-O-Methyl
  misc_feature (25)..(26): 2'-O-Methyl
  misc_feature (28)..(35): 2'-O-Methyl
  misc_feature (1)..(4): Phosphorothioate 3'-Internucleotide Linkage
  misc_feature (17)..(17): 2'-deoxy-2'-Amino
  misc_feature (27)..(27): 2'-deoxy-2'-Amino
  misc_feature (36)..(36): n stands for inverted deoxyabasic derivative
gguggcagccgaaaggcgagugaggucuacauggcn

SEQ ID NO: 9537 - RNA, 36 nt, Artificial Sequence
  Description of Artificial Sequence:  Enzymatic Nucleic acid
  misc_feature (1)..(16): 2'-O-Methyl
  misc_feature (18)..(23): 2'-O-Methyl
  misc_feature (25)..(26): 2'-O-Methyl
  misc_feature (28)..(35): 2'-O-Methyl
  misc_feature (1)..(4): Phosphorothioate 3'-Internucleotide Linkage
  misc_feature (17)..(17): 2'-deoxy-2'-Amino
  misc_feature (27)..(27): 2'-deoxy-2'-Amino
  misc_feature (36)..(36): n stands for inverted deoxyabasic derivative
gauggcagccgaaaggcgagugaggucuagguggcn

SEQ ID NO: 9538 - RNA, 34 nt, Artificial Sequence
  Description of Artificial Sequence:  Enzymatic Nucleic acid
  misc_feature (1)..(15): 2'-O-Methyl
  misc_feature (17)..(22): 2'-O-Methyl
  misc_feature (24)..(25): 2'-O-Methyl
  misc_feature (27)..(33): 2'-O-Methyl
  misc_feature (1)..(4): Phosphorothioate 3'-Internucleotide Linkage
  misc_feature (16)..(16): 2'-deoxy-2'-Amino
  misc_feature (26)..(26): 2'-deoxy-2'-Amino
  misc_feature (34)..(34): n stands for inverted deoxyabasic derivative
guugcagccgaaaggcgagugaggucugguggan

SEQ ID NO: 9539 - RNA, 36 nt, Artificial Sequence
  Description of Artificial Sequence:  Enzymatic Nucleic acid
  misc_feature (1)..(16): 2'-O-Methyl
  misc_feature (18)..(23): 2'-O-Methyl
  misc_feature (25)..(26): 2'-O-Methyl
  misc_feature (28)..(35): 2'-O-Methyl
  misc_feature (1)..(4): Phosphorothioate 3'-Internucleotide Linkage
  misc_feature (17)..(17): 2'-deoxy-2'-Amino
  misc_feature (27)..(27): 2'-deoxy-2'-Amino
  misc_feature (36)..(36): n stands for inverted deoxyabasic derivative
aguugcagccgaaaggcgagugaggucugguggagn

SEQ ID NO: 9540 - RNA, 36 nt, Artificial Sequence
  Description of Artificial Sequence:  Enzymatic Nucleic acid
  misc_feature (1)..(16): 2'-O-Methyl
  misc_feature (18)..(23): 2'-O-Methyl
  misc_feature (25)..(26): 2'-O-Methyl
  misc_feature (28)..(35): 2'-O-Methyl
  misc_feature (1)..(4): Phosphorothioate 3'-Internucleotide Linkage
  misc_feature (17)..(17): 2'-deoxy-2'-Amino
  misc_feature (27)..(27): 2'-deoxy-2'-Amino
  misc_feature (36)..(36): n stands for inverted deoxyabasic derivative
ugaguuggccgaaaggcgagugaggucuacgguggn

SEQ ID NO: 9541 - RNA, 36 nt, Artificial Sequence
  Description of Artificial Sequence:  Enzymatic Nucleic acid
  misc_feature (1)..(16): 2'-O-Methyl
  misc_feature (18)..(23): 2'-O-Methyl
  misc_feature (25)..(26): 2'-O-Methyl
  misc_feature (28)..(35): 2'-O-Methyl
  misc_feature (1)..(4): Phosphorothioate 3'-Internucleotide Linkage
  misc_feature (17)..(17): 2'-deoxy-2'-Amino
  misc_feature (27)..(27): 2'-deoxy-2'-Amino
  misc_feature (36)..(36): n stands for inverted deoxyabasic derivative
gcagguagccgaaaggcgagugaggucuugggagcn

SEQ ID NO: 9542 - RNA, 36 nt, Artificial Sequence
  Description of Artificial Sequence:  Enzymatic Nucleic acid
  misc_feature (1)..(16): 2'-O-Methyl
  misc_feature (18)..(23): 2'-O-Methyl
  misc_feature (25)..(26): 2'-O-Methyl
  misc_feature (28)..(35): 2'-O-Methyl
  misc_feature (1)..(4): Phosphorothioate 3'-Internucleotide Linkage
  misc_feature (17)..(17): 2'-deoxy-2'-Amino
  misc_feature (27)..(27): 2'-deoxy-2'-Amino
  misc_feature (36)..(36): n stands for inverted deoxyabasic derivative
cugcacagccgaaaggcgagugaggucuaccaguun

SEQ ID NO: 9543 - RNA, 36 nt, Artificial Sequence
  Description of Artificial Sequence:  Enzymatic Nucleic acid
  misc_feature (1)..(16): 2'-O-Methyl
  misc_feature (18)..(23): 2'-O-Methyl
  misc_feature (25)..(26): 2'-O-Methyl
  misc_feature (28)..(35): 2'-O-Methyl
  misc_feature (1)..(4): Phosphorothioate 3'-Internucleotide Linkage
  misc_feature (17)..(17): 2'-deoxy-2'-Amino
  misc_feature (27)..(27): 2'-deoxy-2'-Amino
  misc_feature (36)..(36): n stands for inverted deoxyabasic derivative
aucugcagccgaaaggcgagugaggucuacaccagn

SEQ ID NO: 9544 - RNA, 36 nt, Artificial Sequence
  Description of Artificial Sequence:  Enzymatic Nucleic acid
  misc_feature (1)..(16): 2'-O-Methyl
  misc_feature (18)..(23): 2'-O-Methyl
  misc_feature (25)..(26): 2'-O-Methyl
  misc_feature (28)..(35): 2'-O-Methyl
  misc_feature (1)..(4): Phosphorothioate 3'-Internucleotide Linkage
  misc_feature (17)..(17): 2'-deoxy-2'-Amino
  misc_feature (27)..(27): 2'-deoxy-2'-Amino
  misc_feature (36)..(36): n stands for inverted deoxyabasic derivative
caagcgagccgaaaggcgagugaggucugguccucn

SEQ ID NO: 9545 - RNA, 36 nt, Artificial Sequence
  Description of Artificial Sequence:  Enzymatic Nucleic acid
  misc_feature (1)..(16): 2'-O-Methyl
  misc_feature (18)..(23): 2'-O-Methyl
  misc_feature (25)..(26): 2'-O-Methyl
  misc_feature (28)..(35): 2'-O-Methyl
  misc_feature (1)..(4): Phosphorothioate 3'-Internucleotide Linkage
  misc_feature (17)..(17): 2'-deoxy-2'-Amino
  misc_feature (27)..(27): 2'-deoxy-2'-Amino
  misc_feature (36)..(36): n stands for inverted deoxyabasic derivative
gaucucggccgaaaggcgagugaggucuuggcaggn

SEQ ID NO: 9546 - RNA, 36 nt, Artificial Sequence
  Description of Artificial Sequence:  Enzymatic Nucleic acid
  misc_feature (1)..(16): 2'-O-Methyl
  misc_feature (18)..(23): 2'-O-Methyl
  misc_feature (25)..(26): 2'-O-Methyl
  misc_feature (28)..(35): 2'-O-Methyl
  misc_feature (1)..(4): Phosphorothioate 3'-Internucleotide Linkage
  misc_feature (17)..(17): 2'-deoxy-2'-Amino
  misc_feature (27)..(27): 2'-deoxy-2'-Amino
  misc_feature (36)..(36): n stands for inverted deoxyabasic derivative
uccagcagccgaaaggcgagugaggucuuugaccan

SEQ ID NO: 9547 - RNA, 36 nt, Artificial Sequence
  Description of Artificial Sequence:  Enzymatic Nucleic acid
  misc_feature (1)..(16): 2'-O-Methyl
  misc_feature (18)..(23): 2'-O-Methyl
  misc_feature (25)..(26): 2'-O-Methyl
  misc_feature (28)..(35): 2'-O-Methyl
  misc_feature (1)..(4): Phosphorothioate 3'-Internucleotide Linkage
  misc_feature (17)..(17): 2'-deoxy-2'-Amino
  misc_feature (27)..(27): 2'-deoxy-2'-Amino
  misc_feature (36)..(36): n stands for inverted deoxyabasic derivative
ugggcgagccgaaaggcgagugaggucuuaucugcn

SEQ ID NO: 9548 - RNA, 36 nt, Artificial Sequence
  Description of Artificial Sequence:  Enzymatic Nucleic acid
  misc_feature (1)..(16): 2'-O-Methyl
  misc_feature (18)..(23): 2'-O-Methyl
  misc_feature (25)..(26): 2'-O-Methyl
  misc_feature (28)..(35): 2'-O-Methyl
  misc_feature (1)..(4): Phosphorothioate 3'-Internucleotide Linkage
  misc_feature (17)..(17): 2'-deoxy-2'-Amino
  misc_feature (27)..(27): 2'-deoxy-2'-Amino
  misc_feature (36)..(36): n stands for inverted deoxyabasic derivative
cacggaagccgaaaggcgagugaggucuuuugggcn

SEQ ID NO: 9549 - RNA, 36 nt, Artificial Sequence
  Description of Artificial Sequence:  Enzymatic Nucleic acid
  misc_feature (1)..(16): 2'-O-Methyl
  misc_feature (18)..(23): 2'-O-Methyl
  misc_feature (25)..(26): 2'-O-Methyl
  misc_feature (28)..(35): 2'-O-Methyl
  misc_feature (1)..(4): Phosphorothioate 3'-Internucleotide Linkage
  misc_feature (17)..(17): 2'-deoxy-2'-Amino
  misc_feature (27)..(27): 2'-deoxy-2'-Amino
  misc_feature (36)..(36): n stands for inverted deoxyabasic derivative
ugaaugagccgaaaggcgagugaggucuaagguagn

SEQ ID NO: 9550 - RNA, 36 nt, Artificial Sequence
  Description of Artificial Sequence:  Enzymatic Nucleic acid
  misc_feature (1)..(16): 2'-O-Methyl
  misc_feature (18)..(23): 2'-O-Methyl
  misc_feature (25)..(26): 2'-O-Methyl
  misc_feature (28)..(35): 2'-O-Methyl
  misc_feature (1)..(4): Phosphorothioate 3'-Internucleotide Linkage
  misc_feature (17)..(17): 2'-deoxy-2'-Amino
  misc_feature (27)..(27): 2'-deoxy-2'-Amino
  misc_feature (36)..(36): n stands for inverted deoxyabasic derivative
uguaggagccgaaaggcgagugaggucuuuggcaan

SEQ ID NO: 9551 - RNA, 36 nt, Artificial Sequence
  Description of Artificial Sequence:  Enzymatic Nucleic acid
  misc_feature (1)..(16): 2'-O-Methyl
  misc_feature (18)..(23): 2'-O-Methyl
  misc_feature (25)..(26): 2'-O-Methyl
  misc_feature (28)..(35): 2'-O-Methyl
  misc_feature (1)..(4): Phosphorothioate 3'-Internucleotide Linkage
  misc_feature (17)..(17): 2'-deoxy-2'-Amino
  misc_feature (27)..(27): 2'-deoxy-2'-Amino
  misc_feature (36)..(36): n stands for inverted deoxyabasic derivative
cagggcagccgaaaggcgagugaggucugguagaan

SEQ ID NO: 9552 - RNA, 36 nt, Artificial Sequence
  Description of Artificial Sequence:  Enzymatic Nucleic acid
  misc_feature (1)..(16): 2'-O-Methyl
  misc_feature (18)..(23): 2'-O-Methyl
  misc_feature (25)..(26): 2'-O-Methyl
  misc_feature (28)..(35): 2'-O-Methyl
  misc_feature (1)..(4): Phosphorothioate 3'-Internucleotide Linkage
  misc_feature (17)..(17): 2'-deoxy-2'-Amino
  misc_feature (27)..(27): 2'-deoxy-2'-Amino
  misc_feature (36)..(36): n stands for inverted deoxyabasic derivative
uccaccagccgaaaggcgagugaggucugucguccn

SEQ ID NO: 9553 - RNA, 36 nt, Artificial Sequence
  Description of Artificial Sequence:  Enzymatic Nucleic acid
  misc_feature (1)..(16): 2'-O-Methyl
  misc_feature (18)..(23): 2'-O-Methyl
  misc_feature (25)..(26): 2'-O-Methyl
  misc_feature (28)..(35): 2'-O-Methyl
  misc_feature (1)..(4): Phosphorothioate 3'-Internucleotide Linkage
  misc_feature (17)..(17): 2'-deoxy-2'-Amino
  misc_feature (27)..(27): 2'-deoxy-2'-Amino
  misc_feature (36)..(36): n stands for inverted deoxyabasic derivative
cagagaggccgaaaggcgagugaggucuucaggagn

SEQ ID NO: 9554 - RNA, 36 nt, Artificial Sequence
  Description of Artificial Sequence:  Enzymatic Nucleic acid
  misc_feature (1)..(16): 2'-O-Methyl
  misc_feature (18)..(23): 2'-O-Methyl
  misc_feature (25)..(26): 2'-O-Methyl
  misc_feature (28)..(35): 2'-O-Methyl
  misc_feature (1)..(4): Phosphorothioate 3'-Internucleotide Linkage
  misc_feature (17)..(17): 2'-deoxy-2'-Amino
  misc_feature (27)..(27): 2'-deoxy-2'-Amino
  misc_feature (36)..(36): n stands for inverted deoxyabasic derivative
gguugcagccgaaaggcgagugaggucuucagagan

SEQ ID NO: 9555 - RNA, 36 nt, Artificial Sequence
  Description of Artificial Sequence:  Enzymatic Nucleic acid
  misc_feature (1)..(16): 2'-O-Methyl
  misc_feature (18)..(23): 2'-O-Methyl
  misc_feature (25)..(26): 2'-O-Methyl
  misc_feature (28)..(35): 2'-O-Methyl
  misc_feature (1)..(4): Phosphorothioate 3'-Internucleotide Linkage
  misc_feature (17)..(17): 2'-deoxy-2'-Amino
  misc_feature (27)..(27): 2'-deoxy-2'-Amino
  misc_feature (36)..(36): n stands for inverted deoxyabasic derivative
caaggcggccgaaaggcgagugaggucucugugggn

SEQ ID NO: 9556 - RNA, 36 nt, Artificial Sequence
  Description of Artificial Sequence:  Enzymatic Nucleic acid
  misc_feature (1)..(16): 2'-O-Methyl
  misc_feature (18)..(23): 2'-O-Methyl
  misc_feature (25)..(26): 2'-O-Methyl
  misc_feature (28)..(35): 2'-O-Methyl
  misc_feature (1)..(4): Phosphorothioate 3'-Internucleotide Linkage
  misc_feature (17)..(17): 2'-deoxy-2'-Amino
  misc_feature (27)..(27): 2'-deoxy-2'-Amino
  misc_feature (36)..(36): n stands for inverted deoxyabasic derivative
ucaggcagccgaaaggcgagugaggucuugggaggn

SEQ ID NO: 9557 - RNA, 36 nt, Artificial Sequence
  Description of Artificial Sequence:  Enzymatic Nucleic acid
  misc_feature (1)..(16): 2'-O-Methyl
  misc_feature (18)..(23): 2'-O-Methyl
  misc_feature (25)..(26): 2'-O-Methyl
  misc_feature (28)..(35): 2'-O-Methyl
  misc_feature (1)..(4): Phosphorothioate 3'-Internucleotide Linkage
  misc_feature (17)..(17): 2'-deoxy-2'-Amino
  misc_feature (27)..(27): 2'-deoxy-2'-Amino
  misc_feature (36)..(36): n stands for inverted deoxyabasic derivative
gaacggagccgaaaggcgagugaggucuugguuuan

SEQ ID NO: 9558 - RNA, 34 nt, Artificial Sequence
  Description of Artificial Sequence:  Enzymatic Nucleic acid
  misc_feature (1)..(15): 2'-O-Methyl
  misc_feature (17)..(22): 2'-O-Methyl
  misc_feature (24)..(25): 2'-O-Methyl
  misc_feature (27)..(33): 2'-O-Methyl
  misc_feature (1)..(4): Phosphorothioate 3'-Internucleotide Linkage
  misc_feature (16)..(16): 2'-deoxy-2'-Amino
  misc_feature (26)..(26): 2'-deoxy-2'-Amino
  misc_feature (34)..(34): n stands for inverted deoxyabasic derivative
ugggaagccgaaaggcgagugaggucuggacugn

SEQ ID NO: 9559 - RNA, 36 nt, Artificial Sequence
  Description of Artificial Sequence:  Enzymatic Nucleic acid
  misc_feature (1)..(16): 2'-O-Methyl
  misc_feature (18)..(23): 2'-O-Methyl
  misc_feature (25)..(26): 2'-O-Methyl
  misc_feature (28)..(35): 2'-O-Methyl
  misc_feature (1)..(4): Phosphorothioate 3'-Internucleotide Linkage
  misc_feature (17)..(17): 2'-deoxy-2'-Amino
  misc_feature (27)..(27): 2'-deoxy-2'-Amino
  misc_feature (36)..(36): n stands for inverted deoxyabasic derivative
uugggaagccgaaaggcgagugaggucuggacuggn

SEQ ID NO: 9560 - RNA, 36 nt, Artificial Sequence
  Description of Artificial Sequence:  Enzymatic Nucleic acid
  misc_feature (1)..(16): 2'-O-Methyl
  misc_feature (18)..(23): 2'-O-Methyl
  misc_feature (25)..(26): 2'-O-Methyl
  misc_feature (28)..(35): 2'-O-Methyl
  misc_feature (1)..(4): Phosphorothioate 3'-Internucleotide Linkage
  misc_feature (17)..(17): 2'-deoxy-2'-Amino
  misc_feature (27)..(27): 2'-deoxy-2'-Amino
  misc_feature (36)..(36): n stands for inverted deoxyabasic derivative
guugacagccgaaaggcgagugaggucuaggugggn

SEQ ID NO: 9561 - RNA, 36 nt, Artificial Sequence
  Description of Artificial Sequence:  Enzymatic Nucleic acid
  misc_feature (1)..(16): 2'-O-Methyl
  misc_feature (18)..(23): 2'-O-Methyl
  misc_feature (25)..(26): 2'-O-Methyl
  misc_feature (28)..(35): 2'-O-Methyl
  misc_feature (1)..(4): Phosphorothioate 3'-Internucleotide Linkage
  misc_feature (17)..(17): 2'-deoxy-2'-Amino
  misc_feature (27)..(27): 2'-deoxy-2'-Amino
  misc_feature (36)..(36): n stands for inverted deoxyabasic derivative
uuggugggccgaaaggcgagugaggucuugccuuun

SEQ ID NO: 9562 - RNA, 36 nt, Artificial Sequence
  Description of Artificial Sequence:  Enzymatic Nucleic acid
  misc_feature (1)..(16): 2'-O-Methyl
  misc_feature (18)..(23): 2'-O-Methyl
  misc_feature (25)..(26): 2'-O-Methyl
  misc_feature (28)..(35): 2'-O-Methyl
  misc_feature (1)..(4): Phosphorothioate 3'-Internucleotide Linkage
  misc_feature (17)..(17): 2'-deoxy-2'-Amino
  misc_feature (27)..(27): 2'-deoxy-2'-Amino
  misc_feature (36)..(36): n stands for inverted deoxyabasic derivative
ggcgcgagccgaaaggcgagugaggucuccuuaggn

SEQ ID NO: 9563 - RNA, 37 nt, Artificial Sequence
  Description of Artificial Sequence:  Enzymatic Nucleic acid
  misc_feature (1)..(8): 2'-O-Methyl
  misc_feature (14)..(26): 2'-O-Methyl
  misc_feature (28)..(29): 2'-O-Methyl
  misc_feature (31)..(36): 2'-O-Methyl
  misc_feature (1)..(4): Phosphorothioate 3'-Internucleotide Linkage
  misc_feature (9)..(9): 2'-deoxy-2'-Amino
  misc_feature (12)..(12): 2'-deoxy-2'-Amino
  misc_feature (30)..(30): 2'-deoxy-2'-Amino
  misc_feature (37)..(37): n stands for inverted deoxyabasic derivative
gggucgccugaugaggccguuaggccgaaucgcugcn

SEQ ID NO: 9564 - RNA, 35 nt, Artificial Sequence
  Description of Artificial Sequence:  Enzymatic Nucleic acid
  misc_feature (1)..(7): 2'-O-Methyl
  misc_feature (13)..(25): 2'-O-Methyl
  misc_feature (27)..(28): 2'-O-Methyl
  misc_feature (30)..(34): 2'-O-Methyl
  misc_feature (1)..(4): Phosphorothioate 3'-Internucleotide Linkage
  misc_feature (8)..(8): 2'-deoxy-2'-Amino
  misc_feature (11)..(11): 2'-deoxy-2'-Amino
  misc_feature (29)..(29): 2'-deoxy-2'-Amino
  misc_feature (35)..(35): n stands for inverted deoxyabasic derivative
aggcagcugaugaggccguuaggccgaaugcccan

SEQ ID NO: 9565 - RNA, 35 nt, Artificial Sequence
  Description of Artificial Sequence:  Enzymatic Nucleic acid
  misc_feature (1)..(7): 2'-O-Methyl
  misc_feature (13)..(25): 2'-O-Methyl
  misc_feature (27)..(28): 2'-O-Methyl
  misc_feature (30)..(34): 2'-O-Methyl
  misc_feature (1)..(4): Phosphorothioate 3'-Internucleotide Linkage
  misc_feature (8)..(8): 2'-deoxy-2'-Amino
  misc_feature (11)..(11): 2'-deoxy-2'-Amino
  misc_feature (29)..(29): 2'-deoxy-2'-Amino
  misc_feature (35)..(35): n stands for inverted deoxyabasic derivative
gaucaucugaugaggccguuaggccgaauagacan

SEQ ID NO: 9566 - RNA, 37 nt, Artificial Sequence
  Description of Artificial Sequence:  Enzymatic Nucleic acid
  misc_feature (1)..(8): 2'-O-Methyl
  misc_feature (14)..(26): 2'-O-Methyl
  misc_feature (28)..(29): 2'-O-Methyl
  misc_feature (31)..(36): 2'-O-Methyl
  misc_feature (1)..(4): Phosphorothioate 3'-Internucleotide Linkage
  misc_feature (9)..(9): 2'-deoxy-2'-Amino
  misc_feature (12)..(12): 2'-deoxy-2'-Amino
  misc_feature (30)..(30): 2'-deoxy-2'-Amino
  misc_feature (37)..(37): n stands for inverted deoxyabasic derivative
ugaucaucugaugaggccguuaggccgaauagacaun

SEQ ID NO: 9567 - RNA, 35 nt, Artificial Sequence
  Description of Artificial Sequence:  Enzymatic Nucleic acid
  misc_feature (1)..(7): 2'-O-Methyl
  misc_feature (13)..(25): 2'-O-Methyl
  misc_feature (27)..(28): 2'-O-Methyl
  misc_feature (30)..(34): 2'-O-Methyl
  misc_feature (1)..(4): Phosphorothioate 3'-Internucleotide Linkage
  misc_feature (8)..(8): 2'-deoxy-2'-Amino
  misc_feature (11)..(11): 2'-deoxy-2'-Amino
  misc_feature (29)..(29): 2'-deoxy-2'-Amino
  misc_feature (35)..(35): n stands for inverted deoxyabasic derivative
augauccugaugaggccguuaggccgaauguagan

SEQ ID NO: 9568 - RNA, 37 nt, Artificial Sequence
  Description of Artificial Sequence:  Enzymatic Nucleic acid
  misc_feature (1)..(8): 2'-O-Methyl
  misc_feature (14)..(26): 2'-O-Methyl
  misc_feature (28)..(29): 2'-O-Methyl
  misc_feature (31)..(36): 2'-O-Methyl
  misc_feature (1)..(4): Phosphorothioate 3'-Internucleotide Linkage
  misc_feature (9)..(9): 2'-deoxy-2'-Amino
  misc_feature (12)..(12): 2'-deoxy-2'-Amino
  misc_feature (30)..(30): 2'-deoxy-2'-Amino
  misc_feature (37)..(37): n stands for inverted deoxyabasic derivative
caugauccugaugaggccguuaggccgaauguagacn

SEQ ID NO: 9569 - RNA, 35 nt, Artificial Sequence
  Description of Artificial Sequence:  Enzymatic Nucleic acid
  misc_feature (1)..(7): 2'-O-Methyl
  misc_feature (13)..(25): 2'-O-Methyl
  misc_feature (27)..(28): 2'-O-Methyl
  misc_feature (30)..(34): 2'-O-Methyl
  misc_feature (1)..(4): Phosphorothioate 3'-Internucleotide Linkage
  misc_feature (8)..(8): 2'-deoxy-2'-Amino
  misc_feature (11)..(11): 2'-deoxy-2'-Amino
  misc_feature (29)..(29): 2'-deoxy-2'-Amino
  misc_feature (35)..(35): n stands for inverted deoxyabasic derivative
accaugcugaugaggccguuaggccgaaucaugun

SEQ ID NO: 9570 - RNA, 37 nt, Artificial Sequence
  Description of Artificial Sequence:  Enzymatic Nucleic acid
  misc_feature (1)..(8): 2'-O-Methyl
  misc_feature (14)..(26): 2'-O-Methyl
  misc_feature (28)..(29): 2'-O-Methyl
  misc_feature (31)..(36): 2'-O-Methyl
  misc_feature (1)..(4): Phosphorothioate 3'-Internucleotide Linkage
  misc_feature (9)..(9): 2'-deoxy-2'-Amino
  misc_feature (12)..(12): 2'-deoxy-2'-Amino
  misc_feature (30)..(30): 2'-deoxy-2'-Amino
  misc_feature (37)..(37): n stands for inverted deoxyabasic derivative
gaccaugcugaugaggccguuaggccgaaucauguan

SEQ ID NO: 9571 - RNA, 35 nt, Artificial Sequence
  Description of Artificial Sequence:  Enzymatic Nucleic acid
  misc_feature (1)..(7): 2'-O-Methyl
  misc_feature (13)..(25): 2'-O-Methyl
  misc_feature (27)..(28): 2'-O-Methyl
  misc_feature (30)..(34): 2'-O-Methyl
  misc_feature (1)..(4): Phosphorothioate 3'-Internucleotide Linkage
  misc_feature (8)..(8): 2'-deoxy-2'-Amino
  misc_feature (11)..(11): 2'-deoxy-2'-Amino
  misc_feature (29)..(29): 2'-deoxy-2'-Amino
  misc_feature (35)..(35): n stands for inverted deoxyabasic derivative
uugacccugaugaggccguuaggccgaaugaucan

SEQ ID NO: 9572 - RNA, 37 nt, Artificial Sequence
  Description of Artificial Sequence:  Enzymatic Nucleic acid
  misc_feature (1)..(8): 2'-O-Methyl
  misc_feature (14)..(26): 2'-O-Methyl
  misc_feature (28)..(29): 2'-O-Methyl
  misc_feature (31)..(36): 2'-O-Methyl
  misc_feature (1)..(4): Phosphorothioate 3'-Internucleotide Linkage
  misc_feature (9)..(9): 2'-deoxy-2'-Amino
  misc_feature (12)..(12): 2'-deoxy-2'-Amino
  misc_feature (30)..(30): 2'-deoxy-2'-Amino
  misc_feature (37)..(37): n stands for inverted deoxyabasic derivative
cacugugcugaugaggccguuaggccgaaugagggcn

SEQ ID NO: 9573 - RNA, 37 nt, Artificial Sequence
  Description of Artificial Sequence:  Enzymatic Nucleic acid
  misc_feature (1)..(8): 2'-O-Methyl
  misc_feature (14)..(26): 2'-O-Methyl
  misc_feature (28)..(29): 2'-O-Methyl
  misc_feature (31)..(36): 2'-O-Methyl
  misc_feature (1)..(4): Phosphorothioate 3'-Internucleotide Linkage
  misc_feature (9)..(9): 2'-deoxy-2'-Amino
  misc_feature (12)..(12): 2'-deoxy-2'-Amino
  misc_feature (30)..(30): 2'-deoxy-2'-Amino
  misc_feature (37)..(37): n stands for inverted deoxyabasic derivative
aggguugcugaugaggccguuaggccgaaugcugaan

SEQ ID NO: 9574 - RNA, 37 nt, Artificial Sequence
  Description of Artificial Sequence:  Enzymatic Nucleic acid
  misc_feature (1)..(8): 2'-O-Methyl
  misc_feature (14)..(26): 2'-O-Methyl
  misc_feature (28)..(29): 2'-O-Methyl
  misc_feature (31)..(36): 2'-O-Methyl
  misc_feature (1)..(4): Phosphorothioate 3'-Internucleotide Linkage
  misc_feature (9)..(9): 2'-deoxy-2'-Amino
  misc_feature (12)..(12): 2'-deoxy-2'-Amino
  misc_feature (30)..(30): 2'-deoxy-2'-Amino
  misc_feature (37)..(37): n stands for inverted deoxyabasic derivative
uggugggcugaugaggccguuaggccgaauuguagan

SEQ ID NO: 9575 - RNA, 37 nt, Artificial Sequence
  Description of Artificial Sequence:  Enzymatic Nucleic acid
  misc_feature (1)..(8): 2'-O-Methyl
  misc_feature (14)..(26): 2'-O-Methyl
  misc_feature (28)..(29): 2'-O-Methyl
  misc_feature (31)..(36): 2'-O-Methyl
  misc_feature (1)..(4): Phosphorothioate 3'-Internucleotide Linkage
  misc_feature (9)..(9): 2'-deoxy-2'-Amino
  misc_feature (12)..(12): 2'-deoxy-2'-Amino
  misc_feature (30)..(30): 2'-deoxy-2'-Amino
  misc_feature (37)..(37): n stands for inverted deoxyabasic derivative
gcuguaucugaugaggccguuaggccgaaugcccucn

SEQ ID NO: 9576 - RNA, 37 nt, Artificial Sequence
  Description of Artificial Sequence:  Enzymatic Nucleic acid
  misc_feature (1)..(8): 2'-O-Methyl
  misc_feature (14)..(26): 2'-O-Methyl
  misc_feature (28)..(29): 2'-O-Methyl
  misc_feature (31)..(36): 2'-O-Methyl
  misc_feature (1)..(4): Phosphorothioate 3'-Internucleotide Linkage
  misc_feature (9)..(9): 2'-deoxy-2'-Amino
  misc_feature (12)..(12): 2'-deoxy-2'-Amino
  misc_feature (30)..(30): 2'-deoxy-2'-Amino
  misc_feature (37)..(37): n stands for inverted deoxyabasic derivative
cgccguccugaugaggccguuaggccgaauccuccan

SEQ ID NO: 9577 - RNA, 37 nt, Artificial Sequence
  Description of Artificial Sequence:  Enzymatic Nucleic acid
  misc_feature (1)..(8): 2'-O-Methyl
  misc_feature (14)..(26): 2'-O-Methyl
  misc_feature (28)..(29): 2'-O-Methyl
  misc_feature (31)..(36): 2'-O-Methyl
  misc_feature (1)..(4): Phosphorothioate 3'-Internucleotide Linkage
  misc_feature (9)..(9): 2'-deoxy-2'-Amino
  misc_feature (12)..(12): 2'-deoxy-2'-Amino
  misc_feature (30)..(30): 2'-deoxy-2'-Amino
  misc_feature (37)..(37): n stands for inverted deoxyabasic derivative
gaggagucugaugaggccguuaggccgaaugugugan

SEQ ID NO: 9578 - RNA, 37 nt, Artificial Sequence
  Description of Artificial Sequence:  Enzymatic Nucleic acid
  misc_feature (1)..(8): 2'-O-Methyl
  misc_feature (14)..(26): 2'-O-Methyl
  misc_feature (28)..(29): 2'-O-Methyl
  misc_feature (31)..(36): 2'-O-Methyl
  misc_feature (1)..(4): Phosphorothioate 3'-Internucleotide Linkage
  misc_feature (9)..(9): 2'-deoxy-2'-Amino
  misc_feature (12)..(12): 2'-deoxy-2'-Amino
  misc_feature (30)..(30): 2'-deoxy-2'-Amino
  misc_feature (37)..(37): n stands for inverted deoxyabasic derivative
cguaugacugaugaggccguuaggccgaauucuaggn

SEQ ID NO: 9579 - RNA, 37 nt, Artificial Sequence
  Description of Artificial Sequence:  Enzymatic Nucleic acid
  misc_feature (1)..(8): 2'-O-Methyl
  misc_feature (14)..(26): 2'-O-Methyl
  misc_feature (28)..(29): 2'-O-Methyl
  misc_feature (31)..(36): 2'-O-Methyl
  misc_feature (1)..(4): Phosphorothioate 3'-Internucleotide Linkage
  misc_feature (9)..(9): 2'-deoxy-2'-Amino
  misc_feature (12)..(12): 2'-deoxy-2'-Amino
  misc_feature (30)..(30): 2'-deoxy-2'-Amino
  misc_feature (37)..(37): n stands for inverted deoxyabasic derivative
guguugucugaugaggccguuaggccgaauucucccn

SEQ ID NO: 9580 - RNA, 37 nt, Artificial Sequence
  Description of Artificial Sequence:  Enzymatic Nucleic acid
  misc_feature (1)..(8): 2'-O-Methyl
  misc_feature (14)..(26): 2'-O-Methyl
  misc_feature (28)..(29): 2'-O-Methyl
  misc_feature (31)..(36): 2'-O-Methyl
  misc_feature (1)..(4): Phosphorothioate 3'-Internucleotide Linkage
  misc_feature (9)..(9): 2'-deoxy-2'-Amino
  misc_feature (12)..(12): 2'-deoxy-2'-Amino
  misc_feature (30)..(30): 2'-deoxy-2'-Amino
  misc_feature (37)..(37): n stands for inverted deoxyabasic derivative
gucccuucugaugaggccguuaggccgaauacaccgn

SEQ ID NO: 9581 - RNA, 37 nt, Artificial Sequence
  Description of Artificial Sequence:  Enzymatic Nucleic acid
  misc_feature (1)..(8): 2'-O-Methyl
  misc_feature (14)..(26): 2'-O-Methyl
  misc_feature (28)..(29): 2'-O-Methyl
  misc_feature (31)..(36): 2'-O-Methyl
  misc_feature (1)..(4): Phosphorothioate 3'-Internucleotide Linkage
  misc_feature (9)..(9): 2'-deoxy-2'-Amino
  misc_feature (12)..(12): 2'-deoxy-2'-Amino
  misc_feature (30)..(30): 2'-deoxy-2'-Amino
  misc_feature (37)..(37): n stands for inverted deoxyabasic derivative
uugcacgcugaugaggccguuaggccgaauggaggun

SEQ ID NO: 9582 - RNA, 37 nt, Artificial Sequence
  Description of Artificial Sequence:  Enzymatic Nucleic acid
  misc_feature (1)..(8): 2'-O-Methyl
  misc_feature (14)..(26): 2'-O-Methyl
  misc_feature (28)..(29): 2'-O-Methyl
  misc_feature (31)..(36): 2'-O-Methyl
  misc_feature (1)..(4): Phosphorothioate 3'-Internucleotide Linkage
  misc_feature (9)..(9): 2'-deoxy-2'-Amino
  misc_feature (12)..(12): 2'-deoxy-2'-Amino
  misc_feature (30)..(30): 2'-deoxy-2'-Amino
  misc_feature (37)..(37): n stands for inverted deoxyabasic derivative
guaguuccugaugaggccguuaggccgaaugcccuun

SEQ ID NO: 9583 - RNA, 37 nt, Artificial Sequence
  Description of Artificial Sequence:  Enzymatic Nucleic acid
  misc_feature (1)..(8): 2'-O-Methyl
  misc_feature (14)..(26): 2'-O-Methyl
  misc_feature (28)..(29): 2'-O-Methyl
  misc_feature (31)..(36): 2'-O-Methyl
  misc_feature (1)..(4): Phosphorothioate 3'-Internucleotide Linkage
  misc_feature (9)..(9): 2'-deoxy-2'-Amino
  misc_feature (12)..(12): 2'-deoxy-2'-Amino
  misc_feature (30)..(30): 2'-deoxy-2'-Amino
  misc_feature (37)..(37): n stands for inverted deoxyabasic derivative
cuuucuccugaugaggccguuaggccgaauccgcacn

SEQ ID NO: 9584 - RNA, 37 nt, Artificial Sequence
  Description of Artificial Sequence:  Enzymatic Nucleic acid
  misc_feature (1)..(8): 2'-O-Methyl
  misc_feature (14)..(26): 2'-O-Methyl
  misc_feature (28)..(29): 2'-O-Methyl
  misc_feature (31)..(36): 2'-O-Methyl
  misc_feature (1)..(4): Phosphorothioate 3'-Internucleotide Linkage
  misc_feature (9)..(9): 2'-deoxy-2'-Amino
  misc_feature (12)..(12): 2'-deoxy-2'-Amino
  misc_feature (30)..(30): 2'-deoxy-2'-Amino
  misc_feature (37)..(37): n stands for inverted deoxyabasic derivative
gguggaacugaugaggccguuaggccgaauguugcun

SEQ ID NO: 9585 - RNA, 37 nt, Artificial Sequence
  Description of Artificial Sequence:  Enzymatic Nucleic acid
  misc_feature (1)..(8): 2'-O-Methyl
  misc_feature (14)..(26): 2'-O-Methyl
  misc_feature (28)..(29): 2'-O-Methyl
  misc_feature (31)..(36): 2'-O-Methyl
  misc_feature (1)..(4): Phosphorothioate 3'-Internucleotide Linkage
  misc_feature (9)..(9): 2'-deoxy-2'-Amino
  misc_feature (12)..(12): 2'-deoxy-2'-Amino
  misc_feature (30)..(30): 2'-deoxy-2'-Amino
  misc_feature (37)..(37): n stands for inverted deoxyabasic derivative
cgguggacugaugaggccguuaggccgaauuguugcn

SEQ ID NO: 9586 - RNA, 37 nt, Artificial Sequence
  Description of Artificial Sequence:  Enzymatic Nucleic acid
  misc_feature (1)..(8): 2'-O-Methyl
  misc_feature (14)..(26): 2'-O-Methyl
  misc_feature (28)..(29): 2'-O-Methyl
  misc_feature (31)..(36): 2'-O-Methyl
  misc_feature (1)..(4): Phosphorothioate 3'-Internucleotide Linkage
  misc_feature (9)..(9): 2'-deoxy-2'-Amino
  misc_feature (12)..(12): 2'-deoxy-2'-Amino
  misc_feature (30)..(30): 2'-deoxy-2'-Amino
  misc_feature (37)..(37): n stands for inverted deoxyabasic derivative
ggacuggcugaugaggccguuaggccgaauuauguan

SEQ ID NO: 9587 - RNA, 37 nt, Artificial Sequence
  Description of Artificial Sequence:  Enzymatic Nucleic acid
  misc_feature (1)..(8): 2'-O-Methyl
  misc_feature (14)..(26): 2'-O-Methyl
  misc_feature (28)..(29): 2'-O-Methyl
  misc_feature (31)..(36): 2'-O-Methyl
  misc_feature (1)..(4): Phosphorothioate 3'-Internucleotide Linkage
  misc_feature (9)..(9): 2'-deoxy-2'-Amino
  misc_feature (12)..(12): 2'-deoxy-2'-Amino
  misc_feature (30)..(30): 2'-deoxy-2'-Amino
  misc_feature (37)..(37): n stands for inverted deoxyabasic derivative
ugguagucugaugaggccguuaggccgaaugggucun

SEQ ID NO: 9588 - RNA, 35 nt, Artificial Sequence
  Description of Artificial Sequence:  Enzymatic Nucleic acid
  misc_feature (1)..(7): 2'-O-Methyl
  misc_feature (13)..(25): 2'-O-Methyl
  misc_feature (27)..(28): 2'-O-Methyl
  misc_feature (30)..(34): 2'-O-Methyl
  misc_feature (1)..(4): Phosphorothioate 3'-Internucleotide Linkage
  misc_feature (8)..(8): 2'-deoxy-2'-Amino
  misc_feature (11)..(11): 2'-deoxy-2'-Amino
  misc_feature (29)..(29): 2'-deoxy-2'-Amino
  misc_feature (35)..(35): n stands for inverted deoxyabasic derivative
cugguacugaugaggccguuaggccgaaugugggn

SEQ ID NO: 9589 - RNA, 37 nt, Artificial Sequence
  Description of Artificial Sequence:  Enzymatic Nucleic acid
  misc_feature (1)..(8): 2'-O-Methyl
  misc_feature (14)..(26): 2'-O-Methyl
  misc_feature (28)..(29): 2'-O-Methyl
  misc_feature (31)..(36): 2'-O-Methyl
  misc_feature (1)..(4): Phosphorothioate 3'-Internucleotide Linkage
  misc_feature (9)..(9): 2'-deoxy-2'-Amino
  misc_feature (12)..(12): 2'-deoxy-2'-Amino
  misc_feature (30)..(30): 2'-deoxy-2'-Amino
  misc_feature (37)..(37): n stands for inverted deoxyabasic derivative
gacagugcugaugaggccguuaggccgaaugagauan

SEQ ID NO: 9590 - RNA, 37 nt, Artificial Sequence
  Description of Artificial Sequence:  Enzymatic Nucleic acid
  misc_feature (1)..(8): 2'-O-Methyl
  misc_feature (12)..(12): 2'-O-Methyl
  misc_feature (14)..(26): 2'-O-Methyl
  misc_feature (28)..(29): 2'-O-Methyl
  misc_feature (31)..(36): 2'-O-Methyl
  misc_feature (1)..(4): Phosphorothioate 3'-Internucleotide Linkage
  misc_feature (9)..(9): 2'-deoxy-2'-C-allyl
  misc_feature (37)..(37): n stands for inverted deoxyabasic derivative
aaccuggcuagugacgccguuaggcggaaaugugcgn

SEQ ID NO: 9591 - RNA, 37 nt, Artificial Sequence
  Description of Artificial Sequence:  Enzymatic Nucleic acid
  misc_feature (1)..(8): 2'-O-Methyl
  misc_feature (12)..(12): 2'-O-Methyl
  misc_feature (14)..(26): 2'-O-Methyl
  misc_feature (28)..(29): 2'-O-Methyl
  misc_feature (31)..(36): 2'-O-Methyl
  misc_feature (1)..(4): Phosphorothioate 3'-Internucleotide Linkage
  misc_feature (9)..(9): 2'-deoxy-2'-C-allyl
  misc_feature (37)..(37): n stands for inverted deoxyabasic derivative
guacagccuagugacgccguuaggcggaaaguugcgn

SEQ ID NO: 9592 - RNA, 37 nt, Artificial Sequence
  Description of Artificial Sequence:  Enzymatic Nucleic acid
  misc_feature (1)..(8): 2'-O-Methyl
  misc_feature (12)..(12): 2'-O-Methyl
  misc_feature (14)..(26): 2'-O-Methyl
  misc_feature (28)..(29): 2'-O-Methyl
  misc_feature (31)..(36): 2'-O-Methyl
  misc_feature (1)..(4): Phosphorothioate 3'-Internucleotide Linkage
  misc_feature (9)..(9): 2'-deoxy-2'-C-allyl
  misc_feature (30)..(30): n stands for inosine
  misc_feature (37)..(37): n stands for inverted deoxyabasic derivative
cacguuacuagugacgccguuaggcggaancgguagn

SEQ ID NO: 9593 - RNA, 37 nt, Artificial Sequence
  Description of Artificial Sequence:  Enzymatic Nucleic acid
  misc_feature (1)..(8): 2'-O-Methyl
  misc_feature (12)..(12): 2'-O-Methyl
  misc_feature (14)..(26): 2'-O-Methyl
  misc_feature (28)..(29): 2'-O-Methyl
  misc_feature (31)..(36): 2'-O-Methyl
  misc_feature (1)..(4): Phosphorothioate 3'-Internucleotide Linkage
  misc_feature (9)..(9): 2'-deoxy-2'-C-allyl
  misc_feature (30)..(30): n stands for inosine
  misc_feature (37)..(37): n stands for inverted deoxyabasic derivative
ggguuaccuagugacgccguuaggcggaancaagucn

SEQ ID NO: 9594 - RNA, 37 nt, Artificial Sequence
  Description of Artificial Sequence:  Enzymatic Nucleic acid
  misc_feature (1)..(8): 2'-O-Methyl
  misc_feature (14)..(26): 2'-O-Methyl
  misc_feature (28)..(29): 2'-O-Methyl
  misc_feature (31)..(36): 2'-O-Methyl
  misc_feature (1)..(4): Phosphorothioate 3'-Internucleotide Linkage
  misc_feature (9)..(9): 2'-deoxy-2'-Amino
  misc_feature (12)..(12): 2'-deoxy-2'-Amino
  misc_feature (30)..(30): 2'-deoxy-2'-Amino
  misc_feature (37)..(37): n stands for inverted deoxyabasic derivative
gcaucugcuagugacgccguuaggcggaaugaagcgn

SEQ ID NO: 9595 - RNA, 37 nt, Artificial Sequence
  Description of Artificial Sequence:  Enzymatic Nucleic acid
  misc_feature (1)..(8): 2'-O-Methyl
  misc_feature (14)..(26): 2'-O-Methyl
  misc_feature (28)..(29): 2'-O-Methyl
  misc_feature (31)..(36): 2'-O-Methyl
  misc_feature (1)..(4): Phosphorothioate 3'-Internucleotide Linkage
  misc_feature (9)..(9): 2'-deoxy-2'-Amino
  misc_feature (12)..(12): 2'-deoxy-2'-Amino
  misc_feature (30)..(30): 2'-deoxy-2'-Amino
  misc_feature (37)..(37): n stands for inverted deoxyabasic derivative
gcguggccuagugacgccguuaggcggaauacaaugn

SEQ ID NO: 9596 - RNA, 36 nt, Artificial Sequence
  Description of Artificial Sequence:  Enzymatic Nucleic acid
  misc_feature (1)..(16): 2'-O-Methyl
  misc_feature (18)..(18): 2'-O-Methyl
  misc_feature (20)..(21): 2'-O-Methyl
  misc_feature (22)..(34): 2'-O-Methyl
  misc_feature (1)..(4): Phosphorothioate 3'-Internucleotide Linkage
  misc_feature (17)..(17): 2'-deoxy-2'-Amino
  misc_feature (19)..(19): 2'-deoxy-2'-Amino
  misc_feature (35)..(35): n stands for inverted deoxyabasic derivative
gcguggcgccgaaaggcucuggagugaguacaaugn

SEQ ID NO: 9597 - RNA, 36 nt, Artificial Sequence
  Description of Artificial Sequence:  Enzymatic Nucleic acid
  misc_feature (1)..(16): 2'-O-Methyl
  misc_feature (18)..(18): 2'-O-Methyl
  misc_feature (20)..(21): 2'-O-Methyl
  misc_feature (22)..(34): 2'-O-Methyl
  misc_feature (1)..(4): Phosphorothioate 3'-Internucleotide Linkage
  misc_feature (17)..(17): 2'-deoxy-2'-Amino
  misc_feature (19)..(19): 2'-deoxy-2'-Amino
  misc_feature (35)..(35): n stands for inverted deoxyabasic derivative
guacagcgccgaaaggcucuggagugagaguugcgn

SEQ ID NO: 9598 - DNA, 22 bp, Artificial Sequence
  Description of Artificial Sequence:  Enzymatic Nucleic acid
  misc_feature (1)..(1): n stands for inverted deoxyabasic derivative
  misc_feature (22)..(22): n stands for inverted deoxyabasic derivative
  misc_feature (2)..(7): 2'-O-Methyl
  misc_feature (17)..(21): 2'-O-Methyl
  misc_feature (8)..(16): Phosphorothioate 3'-Internucleotide Linkage
nccccagcagctcccauugggn

SEQ ID NO: 9599 - DNA, 25 bp, Artificial Sequence
  Description of Artificial Sequence:  Enzymatic Nucleic acid
  misc_feature (1)..(1): n stands for inverted deoxyabasic derivative
  misc_feature (25)..(25): n stands for inverted deoxyabasic derivative
  misc_feature (2)..(8): 2'-O-Methyl
  misc_feature (18)..(24): 2'-O-Methyl
  misc_feature (9)..(17): Phosphorothioate 3'-Internucleotide Linkage
nuuggucagtttctggcaguucucn

SEQ ID NO: 9600 - DNA, 22 bp, Artificial Sequence
  Description of Artificial Sequence:  Enzymatic Nucleic acid
  misc_feature (1)..(1): n stands for inverted deoxyabasic derivative
  misc_feature (22)..(22): n stands for inverted deoxyabasic derivative
  misc_feature (2)..(7): 2'-O-Methyl
  misc_feature (17)..(21): 2'-O-Methyl
  misc_feature (8)..(16): Phosphorothioate 3'-Internucleotide Linkage
nugucggccccacaggcucggn

SEQ ID NO: 9601 - DNA, 25 bp, Artificial Sequence
  Description of Artificial Sequence:  Enzymatic Nucleic acid
  misc_feature (1)..(1): n stands for inverted deoxyabasic derivative
  misc_feature (25)..(25): n stands for inverted deoxyabasic derivative
  misc_feature (2)..(8): 2'-O-Methyl
  misc_feature (18)..(24): 2'-O-Methyl
  misc_feature (9)..(17): Phosphorothioate 3'-Internucleotide Linkage
ngcaaaaaccctgtgatuuccuuun

SEQ ID NO: 9602 - DNA, 22 bp, Artificial Sequence
  Description of Artificial Sequence:  Enzymatic Nucleic acid
  misc_feature (1)..(1): n stands for inverted deoxyabasic derivative
  misc_feature (22)..(22): n stands for inverted deoxyabasic derivative
  misc_feature (2)..(7): 2'-O-Methyl
  misc_feature (17)..(21): 2'-O-Methyl
  misc_feature (8)..(16): Phosphorothioate 3'-Internucleotide Linkage
ncucggctgacattccggcaan

SEQ ID NO: 9603 - DNA, 25 bp, Artificial Sequence
  Description of Artificial Sequence:  Enzymatic Nucleic acid
  misc_feature (1)..(1): n stands for inverted deoxyabasic derivative
  misc_feature (25)..(25): n stands for inverted deoxyabasic derivative
  misc_feature (2)..(8): 2'-O-Methyl
  misc_feature (18)..(24): 2'-O-Methyl
  misc_feature (9)..(17): Phosphorothioate 3'-Internucleotide Linkage
nguuggagtctgtaggacuuggcan

SEQ ID NO: 9604 - DNA, 17 bp, Artificial Sequence
  Description of Artificial Sequence:  Enzymatic Nucleic acid
  misc_feature (1)..(1): n stands for inverted deoxyabasic derivative
  misc_feature (17)..(17): n stands for inverted deoxyabasic derivative
  misc_feature (2)..(4): 2'-O-Methyl
  misc_feature (14)..(16): 2'-O-Methyl
  misc_feature (5)..(13): Phosphorothioate 3'-Internucleotide Linkage
nccgtggtcatgcuccn

SEQ ID NO: 9605 - DNA, 25 bp, Artificial Sequence
  Description of Artificial Sequence:  Enzymatic Nucleic acid
  misc_feature (1)..(1): n stands for inverted deoxyabasic derivative
  misc_feature (25)..(25): n stands for inverted deoxyabasic derivative
  misc_feature (2)..(8): 2'-O-Methyl
  misc_feature (18)..(24): 2'-O-Methyl
  misc_feature (9)..(17): Phosphorothioate 3'-Internucleotide Linkage
naaaacuccaagatccccaaucaan

SEQ ID NO: 9606 - DNA, 25 bp, Artificial Sequence
  Description of Artificial Sequence:  Enzymatic Nucleic acid
  misc_feature (1)..(1): n stands for inverted deoxyabasic derivative
  misc_feature (25)..(25): n stands for inverted deoxyabasic derivative
  misc_feature (2)..(8): 2'-O-Methyl
  misc_feature (18)..(24): 2'-O-Methyl
  misc_feature (9)..(17): Phosphorothioate 3'-Internucleotide Linkage
naucctccgtggtcatgcuccaaun

SEQ ID NO: 9607 - RNA, 37 nt, Artificial Sequence
  Description of Artificial Sequence:  Enzymatic Nucleic acid
  misc_feature (1)..(8): 2'-O-Methyl
  misc_feature (12)..(12): 2'-O-Methyl
  misc_feature (14)..(26): 2'-O-Methyl
  misc_feature (28)..(29): 2'-O-Methyl
  misc_feature (31)..(36): 2'-O-Methyl
  misc_feature (1)..(4): Phosphorothioate 3'-Internucleotide Linkage
  misc_feature (9)..(9): 2'-deoxy-2'-C-allyl
  misc_feature (37)..(37): n stands for inverted deoxyabasic derivative
ucgacaacuagugacgccguuaggcggaaauagcgun

SEQ ID NO: 9608 - RNA, 37 nt, Artificial Sequence
  Description of Artificial Sequence:  Enzymatic Nucleic acid
  misc_feature (1)..(8): 2'-O-Methyl
  misc_feature (12)..(12): 2'-O-Methyl
  misc_feature (14)..(26): 2'-O-Methyl
  misc_feature (28)..(29): 2'-O-Methyl
  misc_feature (31)..(36): 2'-O-Methyl
  misc_feature (1)..(4): Phosphorothioate 3'-Internucleotide Linkage
  misc_feature (9)..(9): 2'-deoxy-2'-C-allyl
  misc_feature (37)..(37): n stands for inverted deoxyabasic derivative
gccuacgcuagugacgccguuaggcggaaaaccagan

SEQ ID NO: 9609 - RNA, 37 nt, Artificial Sequence
  Description of Artificial Sequence:  Enzymatic Nucleic acid
  misc_feature (1)..(8): 2'-O-Methyl
  misc_feature (12)..(12): 2'-O-Methyl
  misc_feature (14)..(26): 2'-O-Methyl
  misc_feature (28)..(29): 2'-O-Methyl
  misc_feature (31)..(36): 2'-O-Methyl
  misc_feature (1)..(4): Phosphorothioate 3'-Internucleotide Linkage
  misc_feature (9)..(9): 2'-deoxy-2'-C-allyl
  misc_feature (37)..(37): n stands for inverted deoxyabasic derivative
uuucguucuagugacgccguuaggcggaaaauucggn

SEQ ID NO: 9610 - RNA, 35 nt, Artificial Sequence
  Description of Artificial Sequence:  Enzymatic Nucleic acid
  misc_feature (1)..(7): 2'-O-Methyl
  misc_feature (11)..(11): 2'-O-Methyl
  misc_feature (13)..(25): 2'-O-Methyl
  misc_feature (27)..(28): 2'-O-Methyl
  misc_feature (30)..(34): 2'-O-Methyl
  misc_feature (1)..(4): Phosphorothioate 3'-Internucleotide Linkage
  misc_feature (8)..(8): 2'-deoxy-2'-C-allyl
  misc_feature (35)..(35): n stands for inverted deoxyabasic derivative
uagcgccuagugacgccguuaggcggaaagcaucn

SEQ ID NO: 9611 - RNA, 35 nt, Artificial Sequence
  Description of Artificial Sequence:  Enzymatic Nucleic acid
  misc_feature (1)..(7): 2'-O-Methyl
  misc_feature (11)..(11): 2'-O-Methyl
  misc_feature (13)..(25): 2'-O-Methyl
  misc_feature (27)..(28): 2'-O-Methyl
  misc_feature (30)..(34): 2'-O-Methyl
  misc_feature (1)..(4): Phosphorothioate 3'-Internucleotide Linkage
  misc_feature (8)..(8): 2'-deoxy-2'-C-allyl
  misc_feature (35)..(35): n stands for inverted deoxyabasic derivative
ugcugacuagugacgccguuaggcggaaagacggn

SEQ ID NO: 9612 - RNA, 35 nt, Artificial Sequence
  Description of Artificial Sequence:  Enzymatic Nucleic acid
  misc_feature (1)..(7): 2'-O-Methyl
  misc_feature (11)..(11): 2'-O-Methyl
  misc_feature (13)..(25): 2'-O-Methyl
  misc_feature (27)..(28): 2'-O-Methyl
  misc_feature (30)..(34): 2'-O-Methyl
  misc_feature (1)..(4): Phosphorothioate 3'-Internucleotide Linkage
  misc_feature (8)..(8): 2'-deoxy-2'-C-allyl
  misc_feature (29)..(29): n stands for inosine
  misc_feature (35)..(35): n stands for inverted deoxyabasic derivative
cacgaccuagugacgccguuaggcggaangcagcn

SEQ ID NO: 9613 - RNA, 37 nt, Artificial Sequence
  Description of Artificial Sequence:  Enzymatic Nucleic acid
  misc_feature (1)..(8): 2'-O-Methyl
  misc_feature (12)..(12): 2'-O-Methyl
  misc_feature (14)..(26): 2'-O-Methyl
  misc_feature (28)..(29): 2'-O-Methyl
  misc_feature (31)..(36): 2'-O-Methyl
  misc_feature (1)..(4): Phosphorothioate 3'-Internucleotide Linkage
  misc_feature (9)..(9): 2'-deoxy-2'-C-allyl
  misc_feature (30)..(30): n stands for inosine
  misc_feature (37)..(37): n stands for inverted deoxyabasic derivative
uuguucacuagugacgccguuaggcggaanccauggn

SEQ ID NO: 9614 - RNA, 37 nt, Artificial Sequence
  Description of Artificial Sequence:  Enzymatic Nucleic acid
  misc_feature (1)..(8): 2'-O-Methyl
  misc_feature (12)..(12): 2'-O-Methyl
  misc_feature (14)..(26): 2'-O-Methyl
  misc_feature (28)..(29): 2'-O-Methyl
  misc_feature (31)..(36): 2'-O-Methyl
  misc_feature (1)..(4): Phosphorothioate 3'-Internucleotide Linkage
  misc_feature (9)..(9): 2'-deoxy-2'-C-allyl
  misc_feature (30)..(30): n stands for inosine
  misc_feature (37)..(37): n stands for inverted deoxyabasic derivative
gaggugucuagugacgccguuaggcggaancggacgn

SEQ ID NO: 9615 - RNA, 37 nt, Artificial Sequence
  Description of Artificial Sequence:  Enzymatic Nucleic acid
  misc_feature (1)..(8): 2'-O-Methyl
  misc_feature (12)..(12): 2'-O-Methyl
  misc_feature (14)..(26): 2'-O-Methyl
  misc_feature (28)..(29): 2'-O-Methyl
  misc_feature (31)..(36): 2'-O-Methyl
  misc_feature (1)..(4): Phosphorothioate 3'-Internucleotide Linkage
  misc_feature (9)..(9): 2'-deoxy-2'-C-allyl
  misc_feature (30)..(30): n stands for inosine
  misc_feature (37)..(37): n stands for inverted deoxyabasic derivative
uaacgcgcuagugacgccguuaggcggaanaauaggn

SEQ ID NO: 9616 - RNA, 37 nt, Artificial Sequence
  Description of Artificial Sequence:  Enzymatic Nucleic acid
  misc_feature (1)..(8): 2'-O-Methyl
  misc_feature (12)..(12): 2'-O-Methyl
  misc_feature (14)..(26): 2'-O-Methyl
  misc_feature (28)..(29): 2'-O-Methyl
  misc_feature (31)..(36): 2'-O-Methyl
  misc_feature (1)..(4): Phosphorothioate 3'-Internucleotide Linkage
  misc_feature (9)..(9): 2'-deoxy-2'-C-allyl
  misc_feature (30)..(30): n stands for inosine
  misc_feature (37)..(37): n stands for inverted deoxyabasic derivative
ccacgaacuagugacgccguuaggcggaanucggcun

SEQ ID NO: 9617 - RNA, 37 nt, Artificial Sequence
  Description of Artificial Sequence:  Enzymatic Nucleic acid
  misc_feature (1)..(8): 2'-O-Methyl
  misc_feature (12)..(12): 2'-O-Methyl
  misc_feature (14)..(26): 2'-O-Methyl
  misc_feature (28)..(29): 2'-O-Methyl
  misc_feature (31)..(36): 2'-O-Methyl
  misc_feature (1)..(4): Phosphorothioate 3'-Internucleotide Linkage
  misc_feature (9)..(9): 2'-deoxy-2'-C-allyl
  misc_feature (37)..(37): n stands for inverted deoxyabasic derivative
gaucaugcuagugacgccguuaggcggaaagacaucn

SEQ ID NO: 9618 - RNA, 37 nt, Artificial Sequence
  Description of Artificial Sequence:  Enzymatic Nucleic acid
  misc_feature (1)..(8): 2'-O-Methyl
  misc_feature (12)..(12): 2'-O-Methyl
  misc_feature (14)..(26): 2'-O-Methyl
  misc_feature (28)..(29): 2'-O-Methyl
  misc_feature (31)..(36): 2'-O-Methyl
  misc_feature (1)..(4): Phosphorothioate 3'-Internucleotide Linkage
  misc_feature (9)..(9): 2'-deoxy-2'-C-allyl
  misc_feature (37)..(37): n stands for inverted deoxyabasic derivative
aggacaucuagugacgccguuaggcggaaaccagccn

SEQ ID NO: 9619 - RNA, 37 nt, Artificial Sequence
  Description of Artificial Sequence:  Enzymatic Nucleic acid
  misc_feature (1)..(8): 2'-O-Methyl
  misc_feature (12)..(12): 2'-O-Methyl
  misc_feature (14)..(26): 2'-O-Methyl
  misc_feature (28)..(29): 2'-O-Methyl
  misc_feature (31)..(36): 2'-O-Methyl
  misc_feature (1)..(4): Phosphorothioate 3'-Internucleotide Linkage
  misc_feature (9)..(9): 2'-deoxy-2'-C-allyl
  misc_feature (37)..(37): n stands for inverted deoxyabasic derivative
ugauuuccuagugacgccguuaggcggaaagguucun

SEQ ID NO: 9620 - RNA, 35 nt, Artificial Sequence
  Description of Artificial Sequence:  Enzymatic Nucleic acid
  misc_feature (1)..(7): 2'-O-Methyl
  misc_feature (11)..(11): 2'-O-Methyl
  misc_feature (13)..(25): 2'-O-Methyl
  misc_feature (27)..(28): 2'-O-Methyl
  misc_feature (30)..(34): 2'-O-Methyl
  misc_feature (1)..(4): Phosphorothioate 3'-Internucleotide Linkage
  misc_feature (8)..(8): 2'-deoxy-2'-C-allyl
  misc_feature (35)..(35): n stands for inverted deoxyabasic derivative
gcugaccuagugacgccguuaggcggaaacugcan

SEQ ID NO: 9621 - RNA, 35 nt, Artificial Sequence
  Description of Artificial Sequence:  Enzymatic Nucleic acid
  misc_feature (1)..(7): 2'-O-Methyl
  misc_feature (11)..(11): 2'-O-Methyl
  misc_feature (13)..(25): 2'-O-Methyl
  misc_feature (27)..(28): 2'-O-Methyl
  misc_feature (30)..(34): 2'-O-Methyl
  misc_feature (1)..(4): Phosphorothioate 3'-Internucleotide Linkage
  misc_feature (8)..(8): 2'-deoxy-2'-C-allyl
  misc_feature (35)..(35): n stands for inverted deoxyabasic derivative
ggaacgcuagugacgccguuaggcggaaacuggun

SEQ ID NO: 9622 - RNA, 35 nt, Artificial Sequence
  Description of Artificial Sequence:  Enzymatic Nucleic acid
  misc_feature (1)..(7): 2'-O-Methyl
  misc_feature (11)..(11): 2'-O-Methyl
  misc_feature (13)..(25): 2'-O-Methyl
  misc_feature (27)..(28): 2'-O-Methyl
  misc_feature (30)..(34): 2'-O-Methyl
  misc_feature (1)..(4): Phosphorothioate 3'-Internucleotide Linkage
  misc_feature (8)..(8): 2'-deoxy-2'-C-allyl
  misc_feature (29)..(29): n stands for inosine
  misc_feature (35)..(35): n stands for inverted deoxyabasic derivative
gcagcccuagugacgccguuaggcggaancagcan

SEQ ID NO: 9623 - RNA, 37 nt, Artificial Sequence
  Description of Artificial Sequence:  Enzymatic Nucleic acid
  misc_feature (1)..(8): 2'-O-Methyl
  misc_feature (12)..(12): 2'-O-Methyl
  misc_feature (14)..(26): 2'-O-Methyl
  misc_feature (28)..(29): 2'-O-Methyl
  misc_feature (31)..(36): 2'-O-Methyl
  misc_feature (1)..(4): Phosphorothioate 3'-Internucleotide Linkage
  misc_feature (9)..(9): 2'-deoxy-2'-C-allyl
  misc_feature (30)..(30): n stands for inosine
  misc_feature (37)..(37): n stands for inverted deoxyabasic derivative
uauguuccuagugacgccguuaggcggaangcugacn

SEQ ID NO: 9624 - RNA, 37 nt, Artificial Sequence
  Description of Artificial Sequence:  Enzymatic Nucleic acid
  misc_feature (1)..(8): 2'-O-Methyl
  misc_feature (12)..(12): 2'-O-Methyl
  misc_feature (14)..(26): 2'-O-Methyl
  misc_feature (28)..(29): 2'-O-Methyl
  misc_feature (31)..(36): 2'-O-Methyl
  misc_feature (1)..(4): Phosphorothioate 3'-Internucleotide Linkage
  misc_feature (9)..(9): 2'-deoxy-2'-C-allyl
  misc_feature (30)..(30): n stands for inosine
  misc_feature (37)..(37): n stands for inverted deoxyabasic derivative
cgguggacuagugacgccguuaggcggaanugaggcn

SEQ ID NO: 9625 - RNA, 37 nt, Artificial Sequence
  Description of Artificial Sequence:  Enzymatic Nucleic acid
  misc_feature (1)..(8): 2'-O-Methyl
  misc_feature (12)..(12): 2'-O-Methyl
  misc_feature (14)..(26): 2'-O-Methyl
  misc_feature (28)..(29): 2'-O-Methyl
  misc_feature (31)..(36): 2'-O-Methyl
  misc_feature (1)..(4): Phosphorothioate 3'-Internucleotide Linkage
  misc_feature (9)..(9): 2'-deoxy-2'-C-allyl
  misc_feature (30)..(30): n stands for inosine
  misc_feature (37)..(37): n stands for inverted deoxyabasic derivative
aaugacacuagugacgccguuaggcggaanguagcgn

SEQ ID NO: 9626 - RNA, 37 nt, Artificial Sequence
  Description of Artificial Sequence:  Enzymatic Nucleic acid
  misc_feature (1)..(8): 2'-O-Methyl
  misc_feature (12)..(12): 2'-O-Methyl
  misc_feature (14)..(26): 2'-O-Methyl
  misc_feature (28)..(29): 2'-O-Methyl
  misc_feature (31)..(36): 2'-O-Methyl
  misc_feature (1)..(4): Phosphorothioate 3'-Internucleotide Linkage
  misc_feature (9)..(9): 2'-deoxy-2'-C-allyl
  misc_feature (30)..(30): n stands for inosine
  misc_feature (37)..(37): n stands for inverted deoxyabasic derivative
auccauccuagugacgccguuaggcggaanggcacgn

SEQ ID NO: 9627 - RNA, 15 nt, Artificial Sequence
  Description of Artificial Sequence:  Enzymatic Nucleic acid
cccaccagagugaug

SEQ ID NO: 9628 - RNA, 15 nt, Artificial Sequence
  Description of Artificial Sequence:  Enzymatic Nucleic acid
ccaccagagugaugu

SEQ ID NO: 9629 - RNA, 15 nt, Artificial Sequence
  Description of Artificial Sequence:  Enzymatic Nucleic acid
ugucuacaugaucau

SEQ ID NO: 9630 - RNA, 15 nt, Artificial Sequence
  Description of Artificial Sequence:  Enzymatic Nucleic acid
cuacaugaucauggu

SEQ ID NO: 9631 - RNA, 15 nt, Artificial Sequence
  Description of Artificial Sequence:  Enzymatic Nucleic acid
caugaucauggucaa

SEQ ID NO: 9632 - RNA, 10 nt, Artificial Sequence
  Description of Artificial Sequence:  Enzymatic Nucleic acid
gccguuaggc

SEQ ID NO: 9633 - RNA, 15 nt, Artificial Sequence
  Description of Artificial Sequence:  Miscellaneous substrate sequence
  misc_feature (1)..(7): n stands for any a, c, g, or u
  misc_feature (9)..(9): n stands for any a, c, g, or u
  misc_feature (13)..(15): n stands for any a, c, g, or u
nnnnnnnynghynnn

SEQ ID NO: 9634 - RNA, 47 nt, Artificial Sequence
  Description of Artificial Sequence:  Enzymatic Nucleic acid
  misc_feature (1)..(4): n stands for any a, c, g, or u
  misc_feature (9)..(19): n stands for any a, c, g, or u
  misc_feature (25)..(31): n stands for any a, c, g, or u
  misc_feature (39)..(47): n stands for any a, c, g, or u
nnnngaagnnnnnnnnnnnaaahannnnnnnacauuacnnnnnnnnn

SEQ ID NO: 9635 - RNA, 15 nt, Artificial Sequence
  Description of Artificial Sequence:  Miscellaneous substrate sequence
  misc_feature (1)..(6): n stands for a, c, g, or u
  misc_feature (9)..(15): n stands for a, c, g, or u
nnnnnnuhnnnnnnn

SEQ ID NO: 9636 - RNA, 36 nt, Artificial Sequence
  Description of Artificial Sequence:  Enzymatic Nucleic acid
  misc_feature (1)..(7): n stands for a, c, g, or u
  misc_feature (16)..(18): n stands for a, c, g, or u
  misc_feature (23)..(25): n stands for a, c, g, or u
  misc_feature (31)..(36): n stands for a, c, g, or u
  misc_feature (1)..(8): 2'-O-Methyl
  misc_feature (12)..(12): 2'-O-Methyl
  misc_feature (14)..(26): 2'-O-Methyl
  misc_feature (28)..(29): 2'-O-Methyl
  misc_feature (31)..(36): 2'-O-Methyl
  misc_feature (9)..(9): 2'-deoxy-2'-C-Allyl
nnnnnnncugaugagnnngaaannncgaaannnnnn

SEQ ID NO: 9637 - RNA, 15 nt, Artificial Sequence
  Description of Artificial Sequence:  Miscellaneous substrate sequence
  misc_feature (1)..(6): n stands for a, c, g, or u
  misc_feature (9)..(15): n stands for a, c, g, or u
nnnnnnygnnnnnnn

SEQ ID NO: 9638 - RNA, 35 nt, Artificial Sequence
  Description of Artificial Sequence:  Enzymatic Nucleic acid
  misc_feature (1)..(7): n stands for a, c, g, or u
  misc_feature (29)..(35): n stands for a, c, g, or u
  misc_feature (1)..(8): 2'-O-Methyl
  misc_feature (13)..(16): 2'-O-Methyl
  misc_feature (18)..(35): 2'-O-Methyl
  misc_feature (11)..(11): Phosphorothioate 3'-Internucleotide Linkage
nnnnnnnugauggcaugcacuaugcgcgnnnnnnn

SEQ ID NO: 9639 - RNA, 14 nt, Artificial Sequence
  Description of Artificial Sequence:  Miscellaneous substrate sequence
  misc_feature (1)..(5): n stands for a, c, g, or u
  misc_feature (8)..(14): n stands for a, c, g, or u
nnnnnchnnnnnnn

SEQ ID NO: 9640 - RNA, 35 nt, Artificial Sequence
  Description of Artificial Sequence:  Enzymatic Nucleic acid
  misc_feature (1)..(7): n stands for a, c, g, or u
  misc_feature (16)..(18): n stands for a, c, g, or u
  misc_feature (23)..(25): n stands for a, c, g, or u
  misc_feature (31)..(35): n stands for a, c, g, or u
  misc_feature (1)..(8): 2'-O-Methyl
  misc_feature (12)..(12): 2'-O-Methyl
  misc_feature (14)..(26): 2'-O-Methyl
  misc_feature (28)..(29): 2'-O-Methyl
  misc_feature (31)..(35): 2'-O-Methyl
  misc_feature (30)..(30): n stands for Inosine
  misc_feature (9)..(9): 2'-deoxy-2'-C-Allyl
nnnnnnncugaugagnnngaaannncgaannnnnn

SEQ ID NO: 9641 - RNA, 48 nt, Artificial Sequence
  Description of Artificial Sequence:  Enzymatic Nucleic acid
  misc_feature (1)..(8): 2'-O-Methyl
  misc_feature (12)..(21): 2'-O-Methyl
  misc_feature (32)..(37): 2'-O-Methyl
  misc_feature (44)..(48): 2'-O-Methyl
  misc_feature (9)..(10): 2'-deoxy-2'-amino
  misc_feature (22)..(26): 2'-deoxy-2'-amino
  misc_feature (38)..(40): 2'-deoxy-2'-amino
gugugcaaccggaggaaacucccuucaaggacgaaaguccgggacggg

SEQ ID NO: 9642 - RNA, 16 nt, Artificial Sequence
  Description of Artificial Sequence:  Target sequence for SEQ ID NO 9641
gccguggguugcacac

SEQ ID NO: 9643 - RNA, 36 nt, Artificial Sequence
  Description of Artificial Sequence:  Enzymatic Nucleic acid
  misc_feature (1)..(7): 2'-O-Methyl
  misc_feature (36)..(36): 3'-3' inverted abasic moiety
  misc_feature (9)..(15): 2'-O-Methyl
  misc_feature (19)..(19): 2'-O-Methyl
  misc_feature (21)..(21): 2'-O-Methyl
  misc_feature (23)..(23): 2'-O-Methyl
  misc_feature (26)..(26): 2'-O-Methyl
  misc_feature (28)..(35): 2'-O-Methyl
  misc_feature (1)..(4): Phosphorothioate 3'-Internucleotide Linkage
  misc_feature (17)..(17): 2'-Deoxy-2'-Amino
  misc_feature (27)..(27): 2'-Deoxy-2'-Amino
gugccuggccgaaaggcgagugaggucugccgcgcn

SEQ ID NO: 9644 - RNA, 15 nt, Artificial Sequence
  Description of Artificial Sequence:  Target sequence for SEQ ID NO 9643
gcgcggcgcaggcac

SEQ ID NO: 9645 - DNA, 16 bp, Artificial Sequence
  Description of Artificial Sequence:  DNAzyme Motif
rggctagctacaacga
